(19) United States
(12) Patent Application Publication
(10) Pub. No.: US 2003/0109434 A1
(43) Pub. Date: Jun. 12, 2003

(54) Compositions and methods for the therapy and diagnosis of kidney cancer

(75) Inventors: Paul A. Algate, Issaquah, WA (US); Jane Mannion, Edmonds, WA (US); Alexander Gaiger, Seattle, WA (US); Brian Gordon, Seattle, WA (US); Susan L. Harlocker, Seattle, WA (US)

Correspondence Address: SEED INTELLECTUAL PROPERTY LAW GROUP PLLC, 701 FIFTH AVE, SUITE 6300, SEATTLE, WA, 98104-7092, US

(73) Assignee: Corixa Corporation, Seattle, WA (US)

(21) Appl. No.: 10/102,524

(22) Filed: Mar. 19, 2002

Related U.S. Application Data
(60) Provisional application No. 60/343,340, filed on Dec. 21, 2001.
(60) Provisional application No. 60/277,245, filed on Mar. 19, 2001.

(51) Int. Cl. A61K 38/17; C12P 21/02; C12N 5/06; C07K 14/435; C12N 9/00; C07H 21/04

(52) U.S. Cl. 514/12; 435/69.1; 435/183; 435/320.1; 435/325; 530/350; 536/23.1

(57) ABSTRACT

Compositions and methods for the therapy and diagnosis of cancer, particularly kidney cancer, are disclosed. Illustrative compositions comprise one or more kidney tumor polypeptides, immunogenic portions thereof, polynucleotides that encode such polypeptides, antigen presenting cell that expresses such polypeptides, and T cells that are specific for cells expressing such polypeptides. The disclosed compositions are useful, for example, in the diagnosis, prevention and/or treatment of diseases, particularly kidney cancer.

### STATEMENT REGARDING SEQUENCE LISTING

[0001] The Sequence Listing associated with this application is provided on CD-ROM in lieu of a paper copy, and is hereby incorporated by reference into the specification. Three CD-ROMs are provided, containing identical copies of the sequence listing: CD-ROM No. 1 is labeled COPY 1, contains the file 572.app which is 1.4 MB and created on Mar. 19, 2002; CD-ROM No.2 is labeled COPY 2, contains the file 572.app which is 1.4 MB and created on Mar. 19, 2002; CD-ROM No. 3 is labeled CRF, contains the file 572.app which is 1.4 MB and created on Mar. 19, 2002.

### BACKGROUND OF THE INVENTION

[0002] 1. Field of the Invention

[0003] The present invention relates generally to therapy and diagnosis of cancer, such as kidney cancer. The invention is more specifically related to polypeptides, comprising at least a portion of a kidney tumor protein, and to polynucleotides encoding such polypeptides. Such polypeptides and polynucleotides are useful in pharmaceutical compositions, e.g., vaccines, and other compositions for the diagnosis and treatment of kidney cancer.

[0004] 2. Description of the Related Art

[0005] Cancer is a significant health problem throughout the world. Although advances have been made in detection and therapy of cancer, no vaccine or other universally successful method for prevention and/or treatment is currently available. Current therapies, which are generally based on a combination of chemotherapy or surgery and radiation, continue to prove inadequate in many patients.

[0006] Cancer is a significant health problem throughout the world. Although advances have been made in detection and therapy of cancer, no vaccine or other universally successful method for prevention and/or treatment is currently available. Current therapies, which are generally based on a combination of chemotherapy or surgery and radiation, continue to prove inadequate in many patients.

[0007] The American Cancer Society predicted that there would be about 31,200 new cases of kidney cancer in the year 2000 in the United States alone. About 11,900 people, adults and children, will die from this disease each year. The cure rate of advanced stage kidney cancer is only fair and has improved little in the last two decades.

[0008] In spite of considerable research into therapies for these and other cancers, kidney cancer remains difficult to diagnose and treat effectively. Accordingly, there is a need in the art for improved methods for detecting and treating such cancers. The present invention fulfills these needs and further provides other related advantages.

### BRIEF SUMMARY OF THE INVENTION

[0009] In one aspect, the present invention provides polynucleotide compositions comprising a sequence selected from the group consisting of:

[0010] (a) sequences provided in SEQ ID NOs:1-1847, 1852-1855, and 1859-1862;

[0011] (b) complements of the sequences provided in SEQ ID NOs:1-1847, 1852-1855, and 1859-1862;

[0012] (c) sequences consisting of at least 20, 25, 30, 35, 40, 45, 50, 75 and 100 contiguous residues of a sequence provided in SEQ ID NOs:1-1847, 1852-1855, and 1859-1862;

[0013] (d) sequences that hybridize to a sequence provided in SEQ ID NOs:1-1847, 1852-1855, and 1859-1862, under moderate or highly stringent conditions;

[0014] (e) sequences having at least 75%, 80%, 85%, 90%, 95%, 96%, 97%, 98% or 99% identity to a sequence of SEQ ID NOs:1-1847, 1852-1855, and 1859-1862;

[0015] (f) degenerate variants of a sequence provided in SEQ ID NOs:1-1847, 1852-1855, and 1859-1862.

[0016] In one preferred embodiment, the polynucleotide compositions of the invention are expressed in at least about 20%, more preferably in at least about 30%, and most preferably in at least about 50% of kidney tumors samples tested, at a level that is at least about 2-fold, preferably at least about 5-fold, and most preferably at least about 10-fold higher than that for normal tissues.

[0017] The present invention, in another aspect, provides polypeptide compositions comprising an amino acid sequence that is encoded by a polynucleotide sequence described above.

[0018] The present invention further provides polypeptide compositions comprising an amino acid sequence selected from the group consisting of sequences recited in SEQ ID NOs:1848-1851, 1856-1858, and 1863.

[0019] In certain preferred embodiments, the polypeptides and/or polynucleotides of the present invention are immunogenic, i.e., they are capable of eliciting an immune response, particularly a humoral and/or cellular immune response, as further described herein.

[0020] The present invention further provides fragments, variants and/or derivatives of the disclosed polypeptide and/or polynucleotide sequences, wherein the fragments, variants and/or derivatives preferably have a level of immunogenic activity of at least about 50%, preferably at least about 70% and more preferably at least about 90% of the level of immunogenic activity of a polypeptide sequence set forth in SEQ ID NOs: 1848-1851, 1856-1858, and 1863, or a polypeptide sequence encoded by a polynucleotide sequence set forth in SEQ ID NOs:1-1847, 1852-1855, and 1859-1862.

[0021] The present invention further provides polynucleotides that encode a polypeptide described above, expression vectors comprising such polynucleotides and host cells transformed or transfected with such expression vectors.

[0022] Within other aspects, the present invention provides pharmaceutical compositions comprising a polypeptide or polynucleotide as described above and a physiologically acceptable carrier.

[0023] Within a related aspect of the present invention, the pharmaceutical compositions, e.g., vaccine compositions, are provided for prophylactic or therapeutic applications. Such compositions generally comprise an immunogenic polypeptide or polynucleotide of the invention and an immunostimulant, such as an adjuvant.

[0024] The present invention further provides pharmaceutical compositions that comprise: (a) an antibody or antigen-binding fragment thereof that specifically binds to a polypeptide of the present invention, or a fragment thereof; and (b) a physiologically acceptable carrier.

[0025] Within further aspects, the present invention provides pharmaceutical compositions comprising: (a) an antigen presenting cell that expresses a polypeptide as described above and (b) a pharmaceutically acceptable carrier or excipient. Illustrative antigen presenting cells include dendritic cells, macrophages, monocytes, fibroblasts and B cells.

[0026] Within related aspects, pharmaceutical compositions are provided that comprise: (a) an antigen presenting cell that expresses a polypeptide as described above and (b) an immunostimulant.

[0027] The present invention further provides, in other aspects, fusion proteins that comprise at least one polypeptide as described above, as well as polynucleotides encoding such fusion proteins, typically in the form of pharmaceutical compositions, e.g., vaccine compositions, comprising a physiologically acceptable carrier and/or an immunostimulant. The fusions proteins may comprise multiple immunogenic polypeptides or portions/variants thereof, as described herein, and may further comprise one or more polypeptide segments for facilitating the expression, purification and/or immunogenicity of the polypeptide(s).

[0028] Within further aspects, the present invention provides methods for stimulating an immune response in a patient, preferably a T cell response in a human patient, comprising administering a pharmaceutical composition described herein. The patient may be afflicted with kidney cancer, in which case the methods provide treatment for the disease, or patient considered at risk for such a disease may be treated prophylactically.

[0029] Within further aspects, the present invention provides methods for inhibiting the development of a cancer in a patient, comprising administering to a patient a pharmaceutical composition as recited above. The patient may be afflicted with kidney cancer, in which case the methods provide treatment for the disease, or patient considered at risk for such a disease may be treated prophylactically.

[0030] The present invention further provides, within other aspects, methods for removing tumor cells from a biological sample, comprising contacting a biological sample with T cells that specifically react with a polypeptide of the present invention, wherein the step of contacting is performed under conditions and for a time sufficient to permit the removal of cells expressing the protein from the sample.

[0031] Within related aspects, methods are provided for inhibiting the development of a cancer in a patient, comprising administering to a patient a biological sample treated as described above.

[0032] Methods are further provided, within other aspects, for stimulating and/or expanding T cells specific for a polypeptide of the present invention, comprising contacting T cells with one or more of: (i) a polypeptide as described above; (ii) a polynucleotide encoding such a polypeptide; and/or (iii) an antigen presenting cell that expresses such a polypeptide; under conditions and for a time sufficient to permit the stimulation and/or expansion of T cells. Isolated T cell populations comprising T cells prepared as described above are also provided.

[0033] Within further aspects, the present invention provides methods for inhibiting the development of a cancer in a patient, comprising administering to a patient an effective amount of a T cell population as described above.

[0034] The present invention further provides methods for inhibiting the development of a cancer in a patient, comprising the steps of: (a) incubating CD4⁺ and/or CD8⁺ T cells isolated from a patient with one or more of: (i) a polypeptide comprising at least an immunogenic portion of polypeptide disclosed herein; (ii) a polynucleotide encoding such a polypeptide; and (iii) an antigen-presenting cell that expressed such a polypeptide; and (b) administering to the patient an effective amount of the proliferated T cells, and thereby inhibiting the development of a cancer in the patient. Proliferated cells may, but need not, be cloned prior to administration to the patient.

[0035] Within further aspects, the present invention provides methods for determining the presence or absence of a cancer, preferably a kidney cancer, in a patient comprising: (a) contacting a biological sample obtained from a patient with a binding agent that binds to a polypeptide as recited above; (b) detecting in the sample an amount of polypeptide that binds to the binding agent; and (c) comparing the amount of polypeptide with a predetermined cut-off value, and therefrom determining the presence or absence of a cancer in the patient. Within preferred embodiments, the binding agent is an antibody, more preferably a monoclonal antibody.

[0036] The present invention also provides, within other aspects, methods for monitoring the progression of a cancer in a patient. Such methods comprise the steps of: (a) contacting a biological sample obtained from a patient at a first point in time with a binding agent that binds to a polypeptide as recited above; (b) detecting in the sample an amount of polypeptide that binds to the binding agent; (c) repeating steps (a) and (b) using a biological sample obtained from the patient at a subsequent point in time; and (d) comparing the amount of polypeptide detected in step (c) with the amount detected in step (b) and therefrom monitoring the progression of the cancer in the patient.

[0037] The present invention further provides, within other aspects, methods for determining the presence or absence of a cancer in a patient, comprising the steps of: (a) contacting a biological sample, e.g., tumor sample, serum sample, etc., obtained from a patient with an oligonucleotide that hybridizes to a polynucleotide that encodes a polypeptide of the present invention; (b) detecting in the sample a level of a polynucleotide, preferably mRNA, that hybridizes to the oligonucleotide; and (c) comparing the level of polynucleotide that hybridizes to the oligonucleotide with a predetermined cut-off value, and therefrom determining the presence or absence of a cancer in the patient. Within certain embodiments, the amount of mRNA is detected via polymerase chain reaction using, for example, at least one oligonucleotide primer that hybridizes to a polynucleotide encoding a polypeptide as recited above, or a complement of such a polynucleotide. Within other embodiments, the amount of mRNA is detected using a hybridization technique, employing an oligonucleotide probe that hybridizes to a polynucleotide that encodes a polypeptide as recited above, or a complement of such a polynucleotide.

[0038] In related aspects, methods are provided for monitoring the progression of a cancer in a patient, comprising the steps of: (a) contacting a biological sample obtained from a patient with an oligonucleotide that hybridizes to a polynucleotide that encodes a polypeptide of the present invention; (b) detecting in the sample an amount of a polynucleotide that hybridizes to the oligonucleotide; (c) repeating steps (a) and (b) using a biological sample obtained from the patient at a subsequent point in time; and (d) comparing the amount of polynucleotide detected in step (c) with the amount detected in step (b) and therefrom monitoring the progression of the cancer in the patient.

[0039] Within further aspects, the present invention provides antibodies, such as monoclonal antibodies, that bind to a polypeptide as described above, as well as diagnostic kits comprising such antibodies. Diagnostic kits comprising one or more oligonucleotide probes or primers as described above are also provided.

[0040] These and other aspects of the present invention will become apparent upon reference to the following detailed description All references disclosed herein are hereby incorporated by reference in their entirety as if each was incorporated individually.

### BRIEF DESCRIPTION OF THE SEQUENCE IDENTIFIERS

[0041] SEQ ID NO:1-157 are the determined cDNA sequences for the clones described in Tables 2-3.

[0042] SEQ ID NO:158 is the determined cDNA sequence for clone 61931552.

[0043] SEQ ID NO:159 is the determined cDNA sequence for clone 61931599.

[0044] SEQ ID NO:160 is the determined cDNA sequence for clone 61931601.

[0045] SEQ ID NO:161 is the determined cDNA sequence for clone 61931551.

[0046] SEQ ID NO:162 is the determined cDNA sequence for clone 61931553.

[0047] SEQ ID NO:163 is the determined cDNA sequence for clone 61931555.

[0048] SEQ ID NO:164 is the determined cDNA sequence for clone 61931598.

[0049] SEQ ID NO:165 is the determined cDNA sequence for clone 61931600.

[0050] SEQ ID NO:166 is the determined cDNA sequence for clone 61931556.

[0051] SEQ ID NO:167 is the determined cDNA sequence for clone 61931558.

[0052] SEQ ID NO:168 is the determined cDNA sequence for clone 61931560.

[0053] SEQ ID NO:169 is the determined cDNA sequence for clone 61931603.

[0054] SEQ ID NO:170 is the determined cDNA sequence for clone 61931605.

[0055] SEQ ID NO:171 is the determined cDNA sequence for clone 61931607.

[0056] SEQ ID NO:172 is the determined cDNA sequence for clone 61931557.

[0057] SEQ ID NO:173 is the determined cDNA sequence for clone 61931559.

[0058] SEQ ID NO:174 is the determined cDNA sequence for clone 61931561.

[0059] SEQ ID NO:175 is the determined cDNA sequence for clone 61931604.

[0060] SEQ ID NO:176 is the determined cDNA sequence for clone 61931606.

[0061] SEQ ID NO:177 is the determined cDNA sequence for clone 61931608.

[0062] SEQ ID NO:178 is the determined cDNA sequence for clone 61931562.

[0063] SEQ ID NO:179 is the determined cDNA sequence for clone 61931564.

[0064] SEQ ID NO:180 is the determined cDNA sequence for clone 61931566.

[0065] SEQ ID NO:181 is the determined cDNA sequence for clone 61931609.

[0066] SEQ ID NO:182 is the determined cDNA sequence for clone 61931563.

[0067] SEQ ID NO:183 is the determined cDNA sequence for clone 61931565.

[0068] SEQ ID NO:184 is the determined cDNA sequence for clone 61931567.

[0069] SEQ ID NO:185 is the determined cDNA sequence for clone 61931610.

[0070] SEQ ID NO:186 is the determined cDNA sequence for clone 61931612.

[0071] SEQ ID NO:187 is the determined cDNA sequence for clone 61931568.

[0072] SEQ ID NO:188 is the determined cDNA sequence for clone 61931570.

[0073] SEQ ID NO:189 is the determined cDNA sequence for clone 61931572.

[0074] SEQ ID NO:190 is the determined cDNA sequence for clone 61931615.

[0075] SEQ ID NO:191 is the determined cDNA sequence for clone 61931617.

[0076] SEQ ID NO:192 is the determined cDNA sequence for clone 61931619.

[0077] SEQ ID NO:193 is the determined cDNA sequence for clone 61931569.

[0078] SEQ ID NO:194 is the determined cDNA sequence for clone 61931571.

[0079] SEQ ID NO:195 is the determined cDNA sequence for clone 61931573.

[0080] SEQ ID NO:196 is the determined cDNA sequence for clone 61931616.

[0081] SEQ ID NO:197 is the determined cDNA sequence for clone 61931618.

[0082] SEQ ID NO:198 is the determined cDNA sequence for clone 61931620.

[0083] SEQ ID NO:199 is the determined cDNA sequence for clone 61931574.

[0084] SEQ ID NO:200 is the determined cDNA sequence for clone 61931576.

[0085] SEQ ID NO:201 is the determined cDNA sequence for clone 61931578.

[0086] SEQ ID NO:202 is the determined cDNA sequence for clone 61931621.

[0087] SEQ ID NO:203 is the determined cDNA sequence for clone 61931623.

[0088] SEQ ID NO:204 is the determined cDNA sequence for clone 61931625.

[0089] SEQ ID NO:205 is the determined cDNA sequence for clone 61931575.

[0090] SEQ ID NO:206 is the determined cDNA sequence for clone 61931577.

[0091] SEQ ID NO:207 is the determined cDNA sequence for clone 61931579.

[0092] SEQ ID NO:208 is the determined cDNA sequence for clone 61931622.

[0093] SEQ ID NO:209 is the determined cDNA sequence for clone 61931624.

[0094] SEQ ID NO:210 is the determined cDNA sequence for clone 61931626.

[0095] SEQ ID NO:211 is the determined cDNA sequence for clone 61931580.

[0096] SEQ ID NO:212 is the determined cDNA sequence for clone 61931582.

[0097] SEQ ID NO:213 is the determined cDNA sequence for clone 61931584.

[0098] SEQ ID NO:214 is the determined cDNA sequence for clone 61931629.

[0099] SEQ ID NO:215 is the determined cDNA sequence for clone 61931631.

[0100] SEQ ID NO:216 is the determined cDNA sequence for clone 61931581.

[0101] SEQ ID NO:217 is the determined cDNA sequence for clone 61931583.

[0102] SEQ ID NO:218 is the determined cDNA sequence for clone 61931585.

[0103] SEQ ID NO:219 is the determined cDNA sequence for clone 61931628.

[0104] SEQ ID NO:220 is the determined cDNA sequence for clone 61931630.

[0105] SEQ ID NO:221 is the determined cDNA sequence for clone 61931632.

[0106] SEQ ID NO:222 is the determined cDNA sequence for clone 61931586.

[0107] SEQ ID NO:223 is the determined cDNA sequence for clone 61931588.

[0108] SEQ ID NO:224 is the determined cDNA sequence for clone 61931590.

[0109] SEQ ID NO:225 is the determined cDNA sequence for clone 61931633.

[0110] SEQ ID NO:226 is the determined cDNA sequence for clone 61931635.

[0111] SEQ ID NO:227 is the determined cDNA sequence for clone 61931637.

[0112] SEQ ID NO:228 is the determined cDNA sequence for clone 61931589.

[0113] SEQ ID NO:229 is the determined cDNA sequence for clone 61931591.

[0114] SEQ ID NO:230 is the determined cDNA sequence for clone 61931634.

[0115] SEQ ID NO:231 is the determined cDNA sequence for clone 61931636.

[0116] SEQ ID NO:232 is the determined cDNA sequence for clone 61931638.

[0117] SEQ ID NO:233 is the determined cDNA sequence for clone 61931592.

[0118] SEQ ID NO:234 is the determined cDNA sequence for clone 61931594.

[0119] SEQ ID NO:235 is the determined cDNA sequence for clone 61931596.

[0120] SEQ ID NO:236 is the determined cDNA sequence for clone 61931639.

[0121] SEQ ID NO:237 is the determined cDNA sequence for clone 61931641.

[0122] SEQ ID NO:238 is the determined cDNA sequence for clone 61931643.

[0123] SEQ ID NO:239 is the determined cDNA sequence for clone 61931593.

[0124] SEQ ID NO:240 is the determined cDNA sequence for clone 61931595.

[0125] SEQ ID NO:241 is the determined cDNA sequence for clone 61931597.

[0126] SEQ ID NO:242 is the determined cDNA sequence for clone 61931642.

[0127] SEQ ID NO:243 is the determined cDNA sequence for clone 61871832.

[0128] SEQ ID NO:244 is the determined cDNA sequence for clone 61871834.

[0129] SEQ ID NO:245 is the determined cDNA sequence for clone 61871879.

[0130] SEQ ID NO:246 is the determined cDNA sequence for clone 61871881.

[0131] SEQ ID NO:247 is the determined cDNA sequence for clone 61871831.

[0132] SEQ ID NO:248 is the determined cDNA sequence for clone 61871833.

[0133] SEQ ID NO:249 is the determined cDNA sequence for clone 61871835.

[0134] SEQ ID NO:250 is the determined cDNA sequence for clone 61871878.

[0135] SEQ ID NO:251 is the determined cDNA sequence for clone 61871880.

[0136] SEQ ID NO:252 is the determined cDNA sequence for clone 61871882.

[0137] SEQ ID NO:253 is the determined cDNA sequence for clone 61871836.

[0138] SEQ ID NO:254 is the determined cDNA sequence for clone 61871838.

[0139] SEQ ID NO:255 is the determined cDNA sequence for clone 61871840.

[0140] SEQ ID NO:256 is the determined cDNA sequence for clone 61871883.

[0141] SEQ ID NO:257 is the determined cDNA sequence for clone 61871885.

[0142] SEQ ID NO:258 is the determined cDNA sequence for clone 61871887.

[0143] SEQ ID NO:259 is the determined cDNA sequence for clone 61871837.

[0144] SEQ ID NO:260 is the determined cDNA sequence for clone 61871839.

[0145] SEQ ID NO:261 is the determined cDNA sequence for clone 61871841.

[0146] SEQ ID NO:262 is the determined cDNA sequence for clone 61871884.

[0147] SEQ ID NO:263 is the determined cDNA sequence for clone 61871886.

[0148] SEQ ID NO:264 is the determined cDNA sequence for clone 61871888.

[0149] SEQ ID NO:265 is the determined cDNA sequence for clone 61871846.

[0150] SEQ ID NO:266 is the determined cDNA sequence for clone 61871889.

[0151] SEQ ID NO:267 is the determined cDNA sequence for clone 61871891.

[0152] SEQ ID NO:268 is the determined cDNA sequence for clone 61871893.

[0153] SEQ ID NO:269 is the determined cDNA sequence for clone 61871843.

[0154] SEQ ID NO:270 is the determined cDNA sequence for clone 61871890.

[0155] SEQ ID NO:271 is the determined cDNA sequence for clone 61871892.

[0156] SEQ ID NO:272 is the determined cDNA sequence for clone 61871894.

[0157] SEQ ID NO:273 is the determined cDNA sequence for clone 61871848.

[0158] SEQ ID NO:274 is the determined cDNA sequence for clone 61871850.

[0159] SEQ ID NO:275 is the determined cDNA sequence for clone 61871852.

[0160] SEQ ID NO:276 is the determined cDNA sequence for clone 61871895.

[0161] SEQ ID NO:277 is the determined cDNA sequence for clone 61871897.

[0162] SEQ ID NO:278 is the determined cDNA sequence for clone 61871899.

[0163] SEQ ID NO:279 is the determined cDNA sequence for clone 61871849.

[0164] SEQ ID NO:280 is the determined cDNA sequence for clone 61871851.

[0165] SEQ ID NO:281 is the determined cDNA sequence for clone 61871853.

[0166] SEQ ID NO:282 is the determined cDNA sequence for clone 61871896.

[0167] SEQ ID NO:283 is the determined cDNA sequence for clone 61871898.

[0168] SEQ ID NO:284 is the determined cDNA sequence for clone 61871900.

[0169] SEQ ID NO:285 is the determined cDNA sequence for clone 61871854.

[0170] SEQ ID NO:286 is the determined cDNA sequence for clone 61871856.

[0171] SEQ ID NO:287 is the determined cDNA sequence for clone 61871858.

[0172] SEQ ID NO:288 is the determined cDNA sequence for clone 61871901.

[0173] SEQ ID NO:289 is the determined cDNA sequence for clone 61871903.

[0174] SEQ ID NO:290 is the determined cDNA sequence for clone 61871905.

[0175] SEQ ID NO:291 is the determined cDNA sequence for clone 61871855.

[0176] SEQ ID NO:292 is the determined cDNA sequence for clone 61871857.

[0177] SEQ ID NO:293 is the determined cDNA sequence for clone 61871859.

[0178] SEQ ID NO:294 is the determined cDNA sequence for clone 61871902.

[0179] SEQ ID NO:295 is the determined cDNA sequence for clone 61871904.

[0180] SEQ ID NO:296 is the determined cDNA sequence for clone 61871906.

[0181] SEQ ID NO:297 is the determined cDNA sequence for clone 61871860.

[0182] SEQ ID NO:298 is the determined cDNA sequence for clone 61871862.

[0183] SEQ ID NO:299 is the determined cDNA sequence for clone 61871864.

[0184] SEQ ID NO:300 is the determined cDNA sequence for clone 61871907.

[0185] SEQ ID NO:301 is the determined cDNA sequence for clone 61871909.

[0186] SEQ ID NO:302 is the determined cDNA sequence for clone 61871911.

[0187] SEQ ID NO:303 is the determined cDNA sequence for clone 61871861.

[0188] SEQ ID NO:304 is the determined cDNA sequence for clone 61871865.

[0189] SEQ ID NO:305 is the determined cDNA sequence for clone 61871908.

[0190] SEQ ID NO:306 is the determined cDNA sequence for clone 61871910.

[0191] SEQ ID NO:307 is the determined cDNA sequence for clone 61871866.

[0192] SEQ ID NO:308 is the determined cDNA sequence for clone 61871868.

[0193] SEQ ID NO:309 is the determined cDNA sequence for clone 61871870.

[0194] SEQ ID NO:310 is the determined cDNA sequence for clone 61871913.

[0195] SEQ ID NO:311 is the determined cDNA sequence for clone 61871915.

[0196] SEQ ID NO:312 is the determined cDNA sequence for clone 61871917.

[0197] SEQ ID NO:313 is the determined cDNA sequence for clone 61871867.

[0198] SEQ ID NO:314 is the determined cDNA sequence for clone 61871869.

[0199] SEQ ID NO:315 is the determined cDNA sequence for clone 61871871.

[0200] SEQ ID NO:316 is the determined cDNA sequence for clone 61871914.

[0201] SEQ ID NO:317 is the determined cDNA sequence for clone 61871916.

[0202] SEQ ID NO:318 is the determined cDNA sequence for clone 61871918.

[0203] SEQ ID NO:319 is the determined cDNA sequence for clone 61871872.

[0204] SEQ ID NO:320 is the determined cDNA sequence for clone 61871874.

[0205] SEQ ID NO:321 is the determined cDNA sequence for clone 61871876.

[0206] SEQ ID NO:322 is the determined cDNA sequence for clone 61871919.

[0207] SEQ ID NO:323 is the determined cDNA sequence for clone 61871923.

[0208] SEQ ID NO:324 is the determined cDNA sequence for clone 61871875

[0209] SEQ ID NO:325 is the determined cDNA sequence for clone 61871877.

[0210] SEQ ID NO:326 is the determined cDNA sequence for clone 61871920.

[0211] SEQ ID NO:327 is the determined cDNA sequence for clone 61871922.

[0212] SEQ ID NO:328 is the determined cDNA sequence for clone 61871181.

[0213] SEQ ID NO:329 is the determined cDNA sequence for clone 61871183.

[0214] SEQ ID NO:330 is the determined cDNA sequence for clone 61871230.

[0215] SEQ ID NO:331 is the determined cDNA sequence for clone 61871180.

[0216] SEQ ID NO:332 is the determined cDNA sequence for clone 61871182.

[0217] SEQ ID NO:333 is the determined cDNA sequence for clone 61871184.

[0218] SEQ ID NO:334 is the determined cDNA sequence for clone 61871227.

[0219] SEQ ID NO:335 is the determined cDNA sequence for clone 61871229.

[0220] SEQ ID NO:336 is the determined cDNA sequence for clone 61871231.

[0221] SEQ ID NO:337 is the determined cDNA sequence for clone 61871187.

[0222] SEQ ID NO:338 is the determined cDNA sequence for clone 61871189.

[0223] SEQ ID NO:339 is the determined cDNA sequence for clone 61871232.

[0224] SEQ ID NO:340 is the determined cDNA sequence for clone 61871234

[0225] SEQ ID NO:341 is the determined cDNA sequence for clone 61871236.

[0226] SEQ ID NO:342 is the determined cDNA sequence for clone 61871186.

[0227] SEQ ID NO:343 is the determined cDNA sequence for clone 61871188.

[0228] SEQ ID NO:344 is the determined cDNA sequence for clone 61871190.

[0229] SEQ ID NO:345 is the determined cDNA sequence for clone 61871233.

[0230] SEQ ID NO:346 is the determined cDNA sequence for clone 61871235.

[0231] SEQ ID NO:347 is the determined cDNA sequence for clone 61871237.

[0232] SEQ ID NO:348 is the determined cDNA sequence for clone 61871191.

[0233] SEQ ID NO:349 is the determined cDNA sequence for clone 61871193.

[0234] SEQ ID NO:350 is the determined cDNA sequence for clone 61871195.

[0235] SEQ ID NO:351 is the determined cDNA sequence for clone 61871238.

[0236] SEQ ID NO:352 is the determined cDNA sequence for clone 61871240.

[0237] SEQ ID NO:353 is the determined cDNA sequence for clone 61871242.

[0238] SEQ ID NO:354 is the determined cDNA sequence for clone 61871192.

[0239] SEQ ID NO:355 is the determined cDNA sequence for clone 61871194.

[0240] SEQ ID NO:356 is the determined cDNA sequence for clone 61871196.

[0241] SEQ ID NO:357 is the determined cDNA sequence for clone 61871239.

[0242] SEQ ID NO:358 is the determined cDNA sequence for clone 61871241.

[0243] SEQ ID NO:359 is the determined cDNA sequence for clone 61871243.

[0244] SEQ ID NO:360 is the determined cDNA sequence for clone 61871197.

[0245] SEQ ID NO:361 is the determined cDNA sequence for clone 61871199.

[0246] SEQ ID NO:362 is the determined cDNA sequence for clone 61871201.

[0247] SEQ ID NO:363 is the determined cDNA sequence for clone 61871244.

[0248] SEQ ID NO:364 is the determined cDNA sequence for clone 61871246.

[0249] SEQ ID NO:365 is the determined cDNA sequence for clone 61871248.

[0250] SEQ ID NO:366 is the determined cDNA sequence for clone 61871198.

[0251] SEQ ID NO:367 is the determined cDNA sequence for clone 61871200.

[0252] SEQ ID NO:368 is the determined cDNA sequence for clone 61871202.

[0253] SEQ ID NO:369 is the determined cDNA sequence for clone 61871245.

[0254] SEQ ID NO:370 is the determined cDNA sequence for clone 61871247.

[0255] SEQ ID NO:371 is the determined cDNA sequence for clone 61871249.

[0256] SEQ ID NO:372 is the determined cDNA sequence for clone 61871203.

[0257] SEQ ID NO:373 is the determined cDNA sequence for clone 61871205.

[0258] SEQ ID NO:374 is the determined cDNA sequence for clone 61871207.

[0259] SEQ ID NO:375 is the determined cDNA sequence for clone 61871250.

[0260] SEQ ID NO:376 is the determined cDNA sequence for clone 61871254.

[0261] SEQ ID NO:377 is the determined cDNA sequence for clone 61871204.

[0262] SEQ ID NO:378 is the determined cDNA sequence for clone 61871206.

[0263] SEQ ID NO:379 is the determined cDNA sequence for clone 61871208.

[0264] SEQ ID NO:380 is the determined cDNA sequence for clone 61871251.

[0265] SEQ ID NO:381 is the determined cDNA sequence for clone 61871253.

[0266] SEQ ID NO:382 is the determined cDNA sequence for clone 61871255.

[0267] SEQ ID NO:383 is the determined cDNA sequence for clone 61871209.

[0268] SEQ ID NO:384 is the determined cDNA sequence for clone 61871211.

[0269] SEQ ID NO:385 is the determined cDNA sequence for clone 61871213.

[0270] SEQ ID NO:386 is the determined cDNA sequence for clone 61871258.

[0271] SEQ ID NO:387 is the determined cDNA sequence for clone 61871260.

[0272] SEQ ID NO:388 is the determined cDNA sequence for clone 61871210.

[0273] SEQ ID NO:389 is the determined cDNA sequence for clone 61871212.

[0274] SEQ ID NO:390 is the determined cDNA sequence for clone 61871214.

[0275] SEQ ID NO:391 is the determined cDNA sequence for clone 61871257.

[0276] SEQ ID NO:392 is the determined cDNA sequence for clone 61871259.

[0277] SEQ ID NO:393 is the determined cDNA sequence for clone 61871261.

[0278] SEQ ID NO:394 is the determined cDNA sequence for clone 61871215.

[0279] SEQ ID NO:395 is the determined cDNA sequence for clone 61871217.

[0280] SEQ ID NO:396 is the determined cDNA sequence for clone 61871219.

[0281] SEQ ID NO:397 is the determined cDNA sequence for clone 61871264.

[0282] SEQ ID NO:398 is the determined cDNA sequence for clone 61871266.

[0283] SEQ ID NO:399 is the determined cDNA sequence for clone 61871218.

[0284] SEQ ID NO:400 is the determined cDNA sequence for clone 61871220.

[0285] SEQ ID NO:401 is the determined cDNA sequence for clone 61871263.

[0286] SEQ ID NO:402 is the determined cDNA sequence for clone 61871267.

[0287] SEQ ID NO:403 is the determined cDNA sequence for clone 61871221.

[0288] SEQ ID NO:404 is the determined cDNA sequence for clone 61871223.

[0289] SEQ ID NO:405 is the determined cDNA sequence for clone 61871225.

[0290] SEQ ID NO:406 is the determined cDNA sequence for clone 61871270.

[0291] SEQ ID NO:407 is the determined cDNA sequence for clone 61871272.

[0292] SEQ ID NO:408 is the determined cDNA sequence for clone 61871222.

[0293] SEQ ID NO:409 is the determined cDNA sequence for clone 61871226.

[0294] SEQ ID NO:410 is the determined cDNA sequence for clone 61871269.

[0295] SEQ ID NO:411 is the determined cDNA sequence for clone 61871271.

[0296] SEQ ID NO:412 is the determined cDNA sequence for clone 61590220.

[0297] SEQ ID NO:413 is the determined cDNA sequence for clone 61590265.

[0298] SEQ ID NO:414 is the determined cDNA sequence for clone 61590267.

[0299] SEQ ID NO:415 is the determined cDNA sequence for clone 61590217.

[0300] SEQ ID NO:416 is the determined cDNA sequence for clone 61590219.

[0301] SEQ ID NO:417 is the determined cDNA sequence for clone 61590264.

[0302] SEQ ID NO:418 is the determined cDNA sequence for clone 61590266.

[0303] SEQ ID NO:419 is the determined cDNA sequence for clone 61590268.

[0304] SEQ ID NO:420 is the determined cDNA sequence for clone 61590222.

[0305] SEQ ID NO:421 is the determined cDNA sequence for clone 61590224.

[0306] SEQ ID NO:422 is the determined cDNA sequence for clone 61590226.

[0307] SEQ ID NO:423 is the determined cDNA sequence for clone 61590269.

[0308] SEQ ID NO:424 is the determined cDNA sequence for clone 61590271.

[0309] SEQ ID NO:425 is the determined cDNA sequence for clone 61590273.

[0310] SEQ ID NO:426 is the determined cDNA sequence for clone 61590223.

[0311] SEQ ID NO:427 is the determined cDNA sequence for clone 61590225.

[0312] SEQ ID NO:428 is the determined cDNA sequence for clone 61590227.

[0313] SEQ ID NO:429 is the determined cDNA sequence for clone 61590270.

[0314] SEQ ID NO:430 is the determined cDNA sequence for clone 61590272.

[0315] SEQ ID NO:431 is the determined cDNA sequence for clone 61590274.

[0316] SEQ ID NO:432 is the determined cDNA sequence for clone 61590228.

[0317] SEQ ID NO:433 is the determined cDNA sequence for clone 61590232.

[0318] SEQ ID NO:434 is the determined cDNA sequence for clone 61590275.

[0319] SEQ ID NO:435 is the determined cDNA sequence for clone 61590277.

[0320] SEQ ID NO:436 is the determined cDNA sequence for clone 61590279.

[0321] SEQ ID NO:437 is the determined cDNA sequence for clone 61590229.

[0322] SEQ ID NO:438 is the determined cDNA sequence for clone 61590233.

[0323] SEQ ID NO:439 is the determined cDNA sequence for clone 61590280.

[0324] SEQ ID NO:440 is the determined cDNA sequence for clone 61590236.

[0325] SEQ ID NO:441 is the determined cDNA sequence for clone 61590238.

[0326] SEQ ID NO:442 is the determined cDNA sequence for clone 61590281.

[0327] SEQ ID NO:443 is the determined cDNA sequence for clone 61590283.

[0328] SEQ ID NO:444 is the determined cDNA sequence for clone 61590285.

[0329] SEQ ID NO:445 is the determined cDNA sequence for clone 61590237.

[0330] SEQ ID NO:446 is the determined cDNA sequence for clone 61590239.

[0331] SEQ ID NO:447 is the determined cDNA sequence for clone 61590284.

[0332] SEQ ID NO:448 is the determined cDNA sequence for clone 61590240.

[0333] SEQ ID NO:449 is the determined cDNA sequence for clone 61590242.

[0334] SEQ ID NO:450 is the determined cDNA sequence for clone 61590244.

[0335] SEQ ID NO:451 is the determined cDNA sequence for clone 61590287.

[0336] SEQ ID NO:452 is the determined cDNA sequence for clone 61590289.

[0337] SEQ ID NO:453 is the determined cDNA sequence for clone 61590291.

[0338] SEQ ID NO:454 is the determined cDNA sequence for clone 61590241.

[0339] SEQ ID NO:455 is the determined cDNA sequence for clone 61590243.

[0340] SEQ ID NO:456 is the determined cDNA sequence for clone 61590245.

[0341] SEQ ID NO:457 is the determined cDNA sequence for clone 61590288.

[0342] SEQ ID NO:458 is the determined cDNA sequence for clone 61590290.

[0343] SEQ ID NO:459 is the determined cDNA sequence for clone 61590292.

[0344] SEQ ID NO:460 is the determined cDNA sequence for clone 61590246.

[0345] SEQ ID NO:461 is the determined cDNA sequence for clone 61590248.

[0346] SEQ ID NO:462 is the determined cDNA sequence for clone 61590293.

[0347] SEQ ID NO:463 is the determined cDNA sequence for clone 61590295.

[0348] SEQ ID NO:464 is the determined cDNA sequence for clone 61590297.

[0349] SEQ ID NO:465 is the determined cDNA sequence for clone 61590247.

[0350] SEQ ID NO:466 is the determined cDNA sequence for clone 61590249.

[0351] SEQ ID NO:467 is the determined cDNA sequence for clone 61590251.

[0352] SEQ ID NO:468 is the determined cDNA sequence for clone 61590296.

[0353] SEQ ID NO:469 is the determined cDNA sequence for clone 61590298.

[0354] SEQ ID NO:470 is the determined cDNA sequence for clone 61590252.

[0355] SEQ ID NO:471 is the determined cDNA sequence for clone 61590254.

[0356] SEQ ID NO:472 is the determined cDNA sequence for clone 61590256.

[0357] SEQ ID NO:473 is the determined cDNA sequence for clone 61590299.

[0358] SEQ ID NO:474 is the determined cDNA sequence for clone 61590301.

[0359] SEQ ID NO:475 is the determined cDNA sequence for clone 61590303.

[0360] SEQ ID NO:476 is the determined cDNA sequence for clone 61590253.

[0361] SEQ ID NO:477 is the determined cDNA sequence for clone 61590255.

[0362] SEQ ID NO:478 is the determined cDNA sequence for clone 61590300.

[0363] SEQ ID NO:479 is the determined cDNA sequence for clone 61590302.

[0364] SEQ ID NO:480 is the determined cDNA sequence for clone 61590304.

[0365] SEQ ID NO:481 is the determined cDNA sequence for clone 61590260.

[0366] SEQ ID NO:482 is the determined cDNA sequence for clone 61590262.

[0367] SEQ ID NO:483 is the determined cDNA sequence for clone 61590305.

[0368] SEQ ID NO:484 is the determined cDNA sequence for clone 61590307.

[0369] SEQ ID NO:485 is the determined cDNA sequence for clone 61590259.

[0370] SEQ ID NO:486 is the determined cDNA sequence for clone 61590261.

[0371] SEQ ID NO:487 is the determined cDNA sequence for clone 61590263.

[0372] SEQ ID NO:488 is the determined cDNA sequence for clone 61590306.

[0373] SEQ ID NO:489 is the determined cDNA sequence for clone 61590308.

[0374] SEQ ID NO:490 is the determined cDNA sequence for clone 61871460.

[0375] SEQ ID NO:491 is the determined cDNA sequence for clone 61871507.

[0376] SEQ ID NO:492 is the determined cDNA sequence for clone 61871509.

[0377] SEQ ID NO:493 is the determined cDNA sequence for clone 61871459.

[0378] SEQ ID NO:494 is the determined cDNA sequence for clone 61871461.

[0379] SEQ ID NO:495 is the determined cDNA sequence for clone 61871463. SEQ ID NO:496 is the determined cDNA sequence for clone 61871506.

[0380] SEQ ID NO:497 is the determined cDNA sequence for clone 61871508.

[0381] SEQ ID NO:498 is the determined cDNA sequence for clone 61871464.

[0382] SEQ ID NO:499 is the determined cDNA sequence for clone 61871466.

[0383] SEQ ID NO:500 is the determined cDNA sequence for clone 61871468.

[0384] SEQ ID NO:501 is the determined cDNA sequence for clone 61871511.

[0385] SEQ ID NO:502 is the determined cDNA sequence for clone 61871513.

[0386] SEQ ID NO:503 is the determined cDNA sequence for clone 61871515.

[0387] SEQ ID NO:504 is the determined cDNA sequence for clone 61871465.

[0388] SEQ ID NO:505 is the determined cDNA sequence for clone 61871467.

[0389] SEQ ID NO:506 is the determined cDNA sequence for clone 61871469.

[0390] SEQ ID NO:507 is the determined cDNA sequence for clone 61871512.

[0391] SEQ ID NO:508 is the determined cDNA sequence for clone 61871514.

[0392] SEQ ID NO:509 is the determined cDNA sequence for clone 61871516.

[0393] SEQ ID NO:510 is the determined cDNA sequence for clone 61871470.

[0394] SEQ ID NO:511 is the determined cDNA sequence for clone 61871472.

[0395] SEQ ID NO:512 is the determined cDNA sequence for clone 61871517.

[0396] SEQ ID NO:513 is the determined cDNA sequence for clone 61871519.

[0397] SEQ ID NO:514 is the determined cDNA sequence for clone 61871521.

[0398] SEQ ID NO:515 is the determined cDNA sequence for clone 61871471.

[0399] SEQ ID NO:516 is the determined cDNA sequence for clone 61871475.

[0400] SEQ ID NO:517 is the determined cDNA sequence for clone 61871518.

[0401] SEQ ID NO:518 is the determined cDNA sequence for clone 61871520.

[0402] SEQ ID NO:519 is the determined cDNA sequence for clone 61871522.

[0403] SEQ ID NO:520 is the determined cDNA sequence for clone 61871476.

[0404] SEQ ID NO:521 is the determined cDNA sequence for clone 61871478.

[0405] SEQ ID NO:522 is the determined cDNA sequence for clone 61871480.

[0406] SEQ ID NO:523 is the determined cDNA sequence for clone 61871523.

[0407] SEQ ID NO:524 is the determined cDNA sequence for clone 61871525.

[0408] SEQ ID NO:525 is the determined cDNA sequence for clone 61871527.

[0409] SEQ ID NO:526 is the determined cDNA sequence for clone 61871477.

[0410] SEQ ID NO:527 is the determined cDNA sequence for clone 61871479.

[0411] SEQ ID NO:528 is the determined cDNA sequence for clone 61871481.

[0412] SEQ ID NO:529 is the determined cDNA sequence for clone 61871524.

[0413] SEQ ID NO:530 is the determined cDNA sequence for clone 61871526.

[0414] SEQ ID NO:531 is the determined cDNA sequence for clone 61871482.

[0415] SEQ ID NO:532 is the determined cDNA sequence for clone 61871484.

[0416] SEQ ID NO:533 is the determined cDNA sequence for clone 61871486.

[0417] SEQ ID NO:534 is the determined cDNA sequence for clone 61871529.

[0418] SEQ ID NO:535 is the determined cDNA sequence for clone 61871531.

[0419] SEQ ID NO:536 is the determined cDNA sequence for clone 61871483.

[0420] SEQ ID NO:537 is the determined cDNA sequence for clone 61871530.

[0421] SEQ ID NO:538 is the determined cDNA sequence for clone 61871532.

[0422] SEQ ID NO:539 is the determined cDNA sequence for clone 61871534.

[0423] SEQ ID NO:540 is the determined cDNA sequence for clone 61871488.

[0424] SEQ ID NO:541 is the determined cDNA sequence for clone 61871490.

[0425] SEQ ID NO:542 is the determined cDNA sequence for clone 61871492.

[0426] SEQ ID NO:543 is the determined cDNA sequence for clone 61871537.

[0427] SEQ ID NO:544 is the determined cDNA sequence for clone 61871539.

[0428] SEQ ID NO:545 is the determined cDNA sequence for clone 61871489.

[0429] SEQ ID NO:546 is the determined cDNA sequence for clone 61871493.

[0430] SEQ ID NO:547 is the determined cDNA sequence for clone 61871536.

[0431] SEQ ID NO:548 is the determined cDNA sequence for clone 61871538.

[0432] SEQ ID NO:549 is the determined cDNA sequence for clone 61871540.

[0433] SEQ ID NO:550 is the determined cDNA sequence for clone 61871494.

[0434] SEQ ID NO:551 is the determined cDNA sequence for clone 61871496.

[0435] SEQ ID NO:552 is the determined cDNA sequence for clone 61871498.

[0436] SEQ ID NO:553 is the determined cDNA sequence for clone 61871541.

[0437] SEQ ID NO:554 is the determined cDNA sequence for clone 61871543.

[0438] SEQ ID NO:555 is the determined cDNA sequence for clone 61871545.

[0439] SEQ ID NO:556 is the determined cDNA sequence for clone 61871495.

[0440] SEQ ID NO:557 is the determined cDNA sequence for clone 61871497.

[0441] SEQ ID NO:558 is the determined cDNA sequence for clone 61871499.

[0442] SEQ ID NO:559 is the determined cDNA sequence for clone 61871544.

[0443] SEQ ID NO:560 is the determined cDNA sequence for clone 61871546.

[0444] SEQ ID NO:561 is the determined cDNA sequence for clone 61871500.

[0445] SEQ ID NO:562 is the determined cDNA sequence for clone 61871502.

[0446] SEQ ID NO:563 is the determined cDNA sequence for clone 61871504.

[0447] SEQ ID NO:564 is the determined cDNA sequence for clone 61871547.

[0448] SEQ ID NO:565 is the determined cDNA sequence for clone 61871551.

[0449] SEQ ID NO:566 is the determined cDNA sequence for clone 61871501.

[0450] SEQ ID NO:567 is the determined cDNA sequence for clone 61871503.

[0451] SEQ ID NO:568 is the determined cDNA sequence for clone 61871505.

[0452] SEQ ID NO:569 is the determined cDNA sequence for clone 61871548.

[0453] SEQ ID NO:570 is the determined cDNA sequence for clone 61871550.

[0454] SEQ ID NO:571 is the determined cDNA sequence for clone 62416046.

[0455] SEQ ID NO:572 is the determined cDNA sequence for clone 62416047.

[0456] SEQ ID NO:573 is the determined cDNA sequence for clone 62416048.

[0457] SEQ ID NO:574 is the determined cDNA sequence for clone 62416049.

[0458] SEQ ID NO:575 is the determined cDNA sequence for clone 62416050.

[0459] SEQ ID NO:576 is the determined cDNA sequence for clone 62416051.

[0460] SEQ ID NO:577 is the determined cDNA sequence for clone 62416052.

[0461] SEQ ID NO:578 is the determined cDNA sequence for clone 62416053.

[0462] SEQ ID NO:579 is the determined cDNA sequence for clone 62416054.

[0463] SEQ ID NO:580 is the determined cDNA sequence for clone 62416055.

[0464] SEQ ID NO:581 is the determined cDNA sequence for clone 62416056.

[0465] SEQ ID NO:582 is the determined cDNA sequence for clone 62416057.

[0466] SEQ ID NO:583 is the determined cDNA sequence for clone 62416059.

[0467] SEQ ID NO:584 is the determined cDNA sequence for clone 62416060.

[0468] SEQ ID NO:585 is the determined cDNA sequence for clone 62416061.

[0469] SEQ ID NO:586 is the determined cDNA sequence for clone 62416062.

[0470] SEQ ID NO:587 is the determined cDNA sequence for clone 62416063.

[0471] SEQ ID NO:588 is the determined cDNA sequence for clone 62416064.

[0472] SEQ ID NO:589 is the determined cDNA sequence for clone 62416066.

[0473] SEQ ID NO:590 is the determined cDNA sequence for clone 62416067.

[0474] SEQ ID NO:591 is the determined cDNA sequence for clone 62416068.

[0475] SEQ ID NO:592 is the determined cDNA sequence for clone 62416069.

[0476] SEQ ID NO:593 is the determined cDNA sequence for clone 62416070.

[0477] SEQ ID NO:594 is the determined cDNA sequence for clone 62416071.

[0478] SEQ ID NO:595 is the determined cDNA sequence for clone 62416072.

[0479] SEQ ID NO:596 is the determined cDNA sequence for clone 62416073.

[0480] SEQ ID NO:597 is the determined cDNA sequence for clone 62416074.

[0481] SEQ ID NO:598 is the determined cDNA sequence for clone 62416075.

[0482] SEQ ID NO:599 is the determined cDNA sequence for clone 62416076.

[0483] SEQ ID NO:600 is the determined cDNA sequence for clone 62416078.

[0484] SEQ ID NO:601 is the determined cDNA sequence for clone 62416079.

[0485] SEQ ID NO:602 is the determined cDNA sequence for clone 62416080.

[0486] SEQ ID NO:603 is the determined cDNA sequence for clone 62416081.

[0487] SEQ ID NO:604 is the determined cDNA sequence for clone 62416082.

[0488] SEQ ID NO:605 is the determined cDNA sequence for clone 62416083.

[0489] SEQ ID NO:606 is the determined cDNA sequence for clone 62416084.

[0490] SEQ ID NO:607 is the determined cDNA sequence for clone 62416085.

[0491] SEQ ID NO:608 is the determined cDNA sequence for clone 62416086.

[0492] SEQ ID NO:609 is the determined cDNA sequence for clone 62416087.

[0493] SEQ ID NO:610 is the determined cDNA sequence for clone 62416088.

[0494] SEQ ID NO:611 is the determined cDNA sequence for clone 62416089.

[0495] SEQ ID NO:612 is the determined cDNA sequence for clone 62416090.

[0496] SEQ ID NO:613 is the determined cDNA sequence for clone 62416091.

[0497] SEQ ID NO:614 is the determined cDNA sequence for clone 62416092.

[0498] SEQ ID NO:615 is the determined cDNA sequence for clone 62416093.

[0499] SEQ ID NO:616 is the determined cDNA sequence for clone 62416094.

[0500] SEQ ID NO:617 is the determined cDNA sequence for clone 62416095.

[0501] SEQ ID NO:618 is the determined cDNA sequence for clone 62416096.

[0502] SEQ ID NO:619 is the determined cDNA sequence for clone 62416098.

[0503] SEQ ID NO:620 is the determined cDNA sequence for clone 62416099.

[0504] SEQ ID NO:621 is the determined cDNA sequence for clone 62416100.

[0505] SEQ ID NO:622 is the determined cDNA sequence for clone 62416101.

[0506] SEQ ID NO:623 is the determined cDNA sequence for clone 62416102.

[0507] SEQ ID NO:624 is the determined cDNA sequence for clone 62416103.

[0508] SEQ ID NO:625 is the determined cDNA sequence for clone 62416104.

[0509] SEQ ID NO:626 is the determined cDNA sequence for clone 62416105.

[0510] SEQ ID NO:627 is the determined cDNA sequence for clone 62416106.

[0511] SEQ ID NO:628 is the determined cDNA sequence for clone 62416107.

[0512] SEQ ID NO:629 is the determined cDNA sequence for clone 62416108.

[0513] SEQ ID NO:630 is the determined cDNA sequence for clone 62416109.

[0514] SEQ ID NO:631 is the determined cDNA sequence for clone 62416111.

[0515] SEQ ID NO:632 is the determined cDNA sequence for clone 62416112.

[0516] SEQ ID NO:633 is the determined cDNA sequence for clone 62416113.

[0517] SEQ ID NO:634 is the determined cDNA sequence for clone 62416115.

[0518] SEQ ID NO:635 is the determined cDNA sequence for clone 62416116.

[0519] SEQ ID NO:636 is the determined cDNA sequence for clone 62416118.

[0520] SEQ ID NO:637 is the determined cDNA sequence for clone 62416119.

[0521] SEQ ID NO:638 is the determined cDNA sequence for clone 62416121.

[0522] SEQ ID NO:639 is the determined cDNA sequence for clone 62416123.

[0523] SEQ ID NO:640 is the determined cDNA sequence for clone 62416124.

[0524] SEQ ID NO:641 is the determined cDNA sequence for clone 62416125.

[0525] SEQ ID NO:642 is the determined cDNA sequence for clone 62416126.

[0526] SEQ ID NO:643 is the determined cDNA sequence for clone 62416127.

[0527] SEQ ID NO:644 is the determined cDNA sequence for clone 62416129.

[0528] SEQ ID NO:645 is the determined cDNA sequence for clone 62416130.

[0529] SEQ ID NO:646 is the determined cDNA sequence for clone 62416131.

[0530] SEQ ID NO:647 is the determined cDNA sequence for clone 62416132.

[0531] SEQ ID NO:648 is the determined cDNA sequence for clone 62416133.

[0532] SEQ ID NO:649 is the determined cDNA sequence for clone 62416134.

[0533] SEQ ID NO:650 is the determined cDNA sequence for clone 62416135.

[0534] SEQ ID NO:651 is the determined cDNA sequence for clone 62416136.

[0535] SEQ ID NO:652 is the determined cDNA sequence for clone 62416137.

[0536] SEQ ID NO:653 is the determined cDNA sequence for clone 62416138.

[0537] SEQ ID NO:654 is the determined cDNA sequence for clone 61590032.

[0538] SEQ ID NO:655 is the determined cDNA sequence for clone 61590034.

[0539] SEQ ID NO:656 is the determined cDNA sequence for clone 61590079.

[0540] SEQ ID NO:657 is the determined cDNA sequence for clone 61590081.

[0541] SEQ ID NO:658 is the determined cDNA sequence for clone 61590031.

[0542] SEQ ID NO:659 is the determined cDNA sequence for clone 61590033.

[0543] SEQ ID NO:660 is the determined cDNA sequence for clone 61590035.

[0544] SEQ ID NO:661 is the determined cDNA sequence for clone 61590078.

[0545] SEQ ID NO:662 is the determined cDNA sequence for clone 61590080.

[0546] SEQ ID NO:663 is the determined cDNA sequence for clone 61590082.

[0547] SEQ ID NO:664 is the determined cDNA sequence for clone 61590036.

[0548] SEQ ID NO:665 is the determined cDNA sequence for clone 61590038.

[0549] SEQ ID NO:666 is the determined cDNA sequence for clone 61590040.

[0550] SEQ ID NO:667 is the determined cDNA sequence for clone 61590083.

[0551] SEQ ID NO:668 is the determined cDNA sequence for clone 61590085.

[0552] SEQ ID NO:669 is the determined cDNA sequence for clone 61590087.

[0553] SEQ ID NO:670 is the determined cDNA sequence for clone 61590037.

[0554] SEQ ID NO:671 is the determined cDNA sequence for clone 61590041.

[0555] SEQ ID NO:672 is the determined cDNA sequence for clone 61590084.

[0556] SEQ ID NO:673 is the determined cDNA sequence for clone 61590086.

[0557] SEQ ID NO:674 is the determined cDNA sequence for clone 61590088.

[0558] SEQ ID NO:675 is the determined cDNA sequence for clone 61590042.

[0559] SEQ ID NO:676 is the determined cDNA sequence for clone 61590044.

[0560] SEQ ID NO:677 is the determined cDNA sequence for clone 61590046.

[0561] SEQ ID NO:678 is the determined cDNA sequence for clone 61590089.

[0562] SEQ ID NO:679 is the determined cDNA sequence for clone 61590091.

[0563] SEQ ID NO:680 is the determined cDNA sequence for clone 61590093.

[0564] SEQ ID NO:681 is the determined cDNA sequence for clone 61590043.

[0565] SEQ ID NO:682 is the determined cDNA sequence for clone 61590045.

[0566] SEQ ID NO:683 is the determined cDNA sequence for clone 61590047.

[0567] SEQ ID NO:684 is the determined cDNA sequence for clone 61590090.

[0568] SEQ ID NO:685 is the determined cDNA sequence for clone 61590092.

[0569] SEQ ID NO:686 is the determined cDNA sequence for clone 61590094.

[0570] SEQ ID NO:687 is the determined cDNA sequence for clone 61590048.

[0571] SEQ ID NO:688 is the determined cDNA sequence for clone 61590050.

[0572] SEQ ID NO:689 is the determined cDNA sequence for clone 61590052.

[0573] SEQ ID NO:690 is the determined cDNA sequence for clone 61590095.

[0574] SEQ ID NO:691 is the determined cDNA sequence for clone 61590097.

[0575] SEQ ID NO:692 is the determined cDNA sequence for clone 61590099.

[0576] SEQ ID NO:693 is the determined cDNA sequence for clone 61590049.

[0577] SEQ ID NO:694 is the determined cDNA sequence for clone 61590053.

[0578] SEQ ID NO:695 is the determined cDNA sequence for clone 61590096.

[0579] SEQ ID NO:696 is the determined cDNA sequence for clone 61590098.

[0580] SEQ ID NO:697 is the determined cDNA sequence for clone 61590100.

[0581] SEQ ID NO:698 is the determined cDNA sequence for clone 61590054.

[0582] SEQ ID NO:699 is the determined cDNA sequence for clone 61590056.

[0583] SEQ ID NO:700 is the determined cDNA sequence for clone 61590058.

[0584] SEQ ID NO:701 is the determined cDNA sequence for clone 61590103.

[0585] SEQ ID NO:702 is the determined cDNA sequence for clone 61590105.

[0586] SEQ ID NO:703 is the determined cDNA sequence for clone 61590055.

[0587] SEQ ID NO:704 is the determined cDNA sequence for clone 61590057.

[0588] SEQ ID NO:705 is the determined cDNA sequence for clone 61590059.

[0589] SEQ ID NO:706 is the determined cDNA sequence for clone 61590104.

[0590] SEQ ID NO:707 is the determined cDNA sequence for clone 61590060.

[0591] SEQ ID NO:708 is the determined cDNA sequence for clone 61590064.

[0592] SEQ ID NO:709 is the determined cDNA sequence for clone 61590107.

[0593] SEQ ID NO:710 is the determined cDNA sequence for clone 61590109.

[0594] SEQ ID NO:711 is the determined cDNA sequence for clone 61590111.

[0595] SEQ ID NO:712 is the determined cDNA sequence for clone 61590061.

[0596] SEQ ID NO:713 is the determined cDNA sequence for clone 61590063.

[0597] SEQ ID NO:714 is the determined cDNA sequence for clone 61590065.

[0598] SEQ ID NO:715 is the determined cDNA sequence for clone 61590108.

[0599] SEQ ID NO:716 is the determined cDNA sequence for clone 61590112.

[0600] SEQ ID NO:717 is the determined cDNA sequence for clone 61590066.

[0601] SEQ ID NO:718 is the determined cDNA sequence for clone 61590068.

[0602] SEQ ID NO:719 is the determined cDNA sequence for clone 61590070.

[0603] SEQ ID NO:720 is the determined cDNA sequence for clone 61590113.

[0604] SEQ ID NO:721 is the determined cDNA sequence for clone 61590067.

[0605] SEQ ID NO:722 is the determined cDNA sequence for clone 61590069.

[0606] SEQ ID NO:723 is the determined cDNA sequence for clone 61590071.

[0607] SEQ ID NO:724 is the determined cDNA sequence for clone 61590114.

[0608] SEQ ID NO:725 is the determined cDNA sequence for clone 61590118.

[0609] SEQ ID NO:726 is the determined cDNA sequence for clone 61590072.

[0610] SEQ ID NO:727 is the determined cDNA sequence for clone 61590074.

[0611] SEQ ID NO:728 is the determined cDNA sequence for clone 61590076.

[0612] SEQ ID NO:729 is the determined cDNA sequence for clone 61590119.

[0613] SEQ ID NO:730 is the determined cDNA sequence for clone 61590121.

[0614] SEQ ID NO:731 is the determined cDNA sequence for clone 61590123.

[0615] SEQ ID NO:732 is the determined cDNA sequence for clone 61590073.

[0616] SEQ ID NO:733 is the determined cDNA sequence for clone 61590075.

[0617] SEQ ID NO:734 is the determined cDNA sequence for clone 61590120.

[0618] SEQ ID NO:735 is the determined cDNA sequence for clone 61590122.

[0619] SEQ ID NO:736 is the determined cDNA sequence for clone 61932203.

[0620] SEQ ID NO:737 is the determined cDNA sequence for clone 61932205.

[0621] SEQ ID NO:738 is the determined cDNA sequence for clone 61932252.

[0622] SEQ ID NO:739 is the determined cDNA sequence for clone 61932202.

[0623] SEQ ID NO:740 is the determined cDNA sequence for clone 61932204.

[0624] SEQ ID NO:741 is the determined cDNA sequence for clone 61932206.

[0625] SEQ ID NO:742 is the determined cDNA sequence for clone 61932251.

[0626] SEQ ID NO:743 is the determined cDNA sequence for clone 61932253.

[0627] SEQ ID NO:744 is the determined cDNA sequence for clone 61932207.

[0628] SEQ ID NO:745 is the determined cDNA sequence for clone 61932209.

[0629] SEQ ID NO:746 is the determined cDNA sequence for clone 61932211.

[0630] SEQ ID NO:747 is the determined cDNA sequence for clone 61932254.

[0631] SEQ ID NO:748 is the determined cDNA sequence for clone 61932256.

[0632] SEQ ID NO:749 is the determined cDNA sequence for clone 61932208.

[0633] SEQ ID NO:750 is the determined cDNA sequence for clone 61932210.

[0634] SEQ ID NO:751 is the determined cDNA sequence for clone 61932212.

[0635] SEQ ID NO:752 is the determined cDNA sequence for clone 61932257.

[0636] SEQ ID NO:753 is the determined cDNA sequence for clone 61932213.

[0637] SEQ ID NO:754 is the determined cDNA sequence for clone 61932215.

[0638] SEQ ID NO:755 is the determined cDNA sequence for clone 61932217.

[0639] SEQ ID NO:756 is the determined cDNA sequence for clone 61932260.

[0640] SEQ ID NO:757 is the determined cDNA sequence for clone 61932262.

[0641] SEQ ID NO:758 is the determined cDNA sequence for clone 61932264.

[0642] SEQ ID NO:759 is the determined cDNA sequence for clone 61932214.

[0643] SEQ ID NO:760 is the determined cDNA sequence for clone 61932216.

[0644] SEQ ID NO:761 is the determined cDNA sequence for clone 61932218.

[0645] SEQ ID NO:762 is the determined cDNA sequence for clone 61932261.

[0646] SEQ ID NO:763 is the determined cDNA sequence for clone 61932265.

[0647] SEQ ID NO:764 is the determined cDNA sequence for clone 61932219.

[0648] SEQ ID NO:765 is the determined cDNA sequence for clone 61932223.

[0649] SEQ ID NO:766 is the determined cDNA sequence for clone 61932268.

[0650] SEQ ID NO:767 is the determined cDNA sequence for clone 61932270.

[0651] SEQ ID NO:768 is the determined cDNA sequence for clone 61932220.

[0652] SEQ ID NO:769 is the determined cDNA sequence for clone 61932224.

[0653] SEQ ID NO:770 is the determined cDNA sequence for clone 61932267.

[0654] SEQ ID NO:771 is the determined cDNA sequence for clone 61932271.

[0655] SEQ ID NO:772 is the determined cDNA sequence for clone 61932225.

[0656] SEQ ID NO:773 is the determined cDNA sequence for clone 61932227.

[0657] SEQ ID NO:774 is the determined cDNA sequence for clone 61932229.

[0658] SEQ ID NO:775 is the determined cDNA sequence for clone 61932272.

[0659] SEQ ID NO:776 is the determined cDNA sequence for clone 61932228.

[0660] SEQ ID NO:777 is the determined cDNA sequence for clone 61932230.

[0661] SEQ ID NO:778 is the determined cDNA sequence for clone 61932273.

[0662] SEQ ID NO:779 is the determined cDNA sequence for clone 61932275.

[0663] SEQ ID NO:780 is the determined cDNA sequence for clone 61932277.

[0664] SEQ ID NO:781 is the determined cDNA sequence for clone 61932231.

[0665] SEQ ID NO:782 is the determined cDNA sequence for clone 61932233.

[0666] SEQ ID NO:783 is the determined cDNA sequence for clone 61932278.

[0667] SEQ ID NO:784 is the determined cDNA sequence for clone 61932280.

[0668] SEQ ID NO:785 is the determined cDNA sequence for clone 61932232.

[0669] SEQ ID NO:786 is the determined cDNA sequence for clone 61932234.

[0670] SEQ ID NO:787 is the determined cDNA sequence for clone 61932236.

[0671] SEQ ID NO:788 is the determined cDNA sequence for clone 61932279.

[0672] SEQ ID NO:789 is the determined cDNA sequence for clone 61932281.

[0673] SEQ ID NO:790 is the determined cDNA sequence for clone 61932237.

[0674] SEQ ID NO:791 is the determined cDNA sequence for clone 61932239.

[0675] SEQ ID NO:792 is the determined cDNA sequence for clone 61932284.

[0676] SEQ ID NO:793 is the determined cDNA sequence for clone 61932288.

[0677] SEQ ID NO:794 is the determined cDNA sequence for clone 61932238.

[0678] SEQ ID NO:795 is the determined cDNA sequence for clone 61932240.

[0679] SEQ ID NO:796 is the determined cDNA sequence for clone 61932242.

[0680] SEQ ID NO:797 is the determined cDNA sequence for clone 61932285.

[0681] SEQ ID NO:798 is the determined cDNA sequence for clone 61932287.

[0682] SEQ ID NO:799 is the determined cDNA sequence for clone 61932289.

[0683] SEQ ID NO:800 is the determined cDNA sequence for clone 61932243.

[0684] SEQ ID NO:801 is the determined cDNA sequence for clone 61932245.

[0685] SEQ ID NO:802 is the determined cDNA sequence for clone 61932247.

[0686] SEQ ID NO:803 is the determined cDNA sequence for clone 61932290.

[0687] SEQ ID NO:804 is the determined cDNA sequence for clone 61932292.

[0688] SEQ ID NO:805 is the determined cDNA sequence for clone 61932294.

[0689] SEQ ID NO:806 is the determined cDNA sequence for clone 61932244.

[0690] SEQ ID NO:807 is the determined cDNA sequence for clone 61932246.

[0691] SEQ ID NO:808 is the determined cDNA sequence for clone 61932248.

[0692] SEQ ID NO:809 is the determined cDNA sequence for clone 61932291.

[0693] SEQ ID NO:810 is the determined cDNA sequence for clone 61932293.

[0694] SEQ ID NO:811 is the determined cDNA sequence for clone 61814652.

[0695] SEQ ID NO:812 is the determined cDNA sequence for clone 61814654.

[0696] SEQ ID NO:813 is the determined cDNA sequence for clone 61814699.

[0697] SEQ ID NO:814 is the determined cDNA sequence for clone 61814651.

[0698] SEQ ID NO:815 is the determined cDNA sequence for clone 61814653.

[0699] SEQ ID NO:816 is the determined cDNA sequence for clone 61814655.

[0700] SEQ ID NO:817 is the determined cDNA sequence for clone 61814698.

[0701] SEQ ID NO:818 is the determined cDNA sequence for clone 61814700.

[0702] SEQ ID NO:819 is the determined cDNA sequence for clone 61814656.

[0703] SEQ ID NO:820 is the determined cDNA sequence for clone 61814658.

[0704] SEQ ID NO:821 is the determined cDNA sequence for clone 61814660.

[0705] SEQ ID NO:822 is the determined cDNA sequence for clone 61814703.

[0706] SEQ ID NO:823 is the determined cDNA sequence for clone 61814705.

[0707] SEQ ID NO:824 is the determined cDNA sequence for clone 61814707.

[0708] SEQ ID NO:825 is the determined cDNA sequence for clone 61814657.

[0709] SEQ ID NO:826 is the determined cDNA sequence for clone 61814659.

[0710] SEQ ID NO:827 is the determined cDNA sequence for clone 61814661.

[0711] SEQ ID NO:828 is the determined cDNA sequence for clone 61814704.

[0712] SEQ ID NO:829 is the determined cDNA sequence for clone 61814662.

[0713] SEQ ID NO:830 is the determined cDNA sequence for clone 61814664.

[0714] SEQ ID NO:831 is the determined cDNA sequence for clone 61814666.

[0715] SEQ ID NO:832 is the determined cDNA sequence for clone 61814709.

[0716] SEQ ID NO:833 is the determined cDNA sequence for clone 61814711.

[0717] SEQ ID NO:834 is the determined cDNA sequence for clone 61814663.

[0718] SEQ ID NO:835 is the determined cDNA sequence for clone 61814665.

[0719] SEQ ID NO:836 is the determined cDNA sequence for clone 61814667.

[0720] SEQ ID NO:837 is the determined cDNA sequence for clone 61814710.

[0721] SEQ ID NO:838 is the determined cDNA sequence for clone 61814712.

[0722] SEQ ID NO:839 is the determined cDNA sequence for clone 61814714.

[0723] SEQ ID NO:840 is the determined cDNA sequence for clone 61814668.

[0724] SEQ ID NO:841 is the determined cDNA sequence for clone 61814670.

[0725] SEQ ID NO:842 is the determined cDNA sequence for clone 61814672.

[0726] SEQ ID NO:843 is the determined cDNA sequence for clone 61814715.

[0727] SEQ ID NO:844 is the determined cDNA sequence for clone 61814717.

[0728] SEQ ID NO:845 is the determined cDNA sequence for clone 61814719.

[0729] SEQ ID NO:846 is the determined cDNA sequence for clone 61814669. SEQ ID NO:847 is the determined cDNA sequence for clone 61814671.

[0730] SEQ ID NO:848 is the determined cDNA sequence for clone 61814673.

[0731] SEQ ID NO:849 is the determined cDNA sequence for clone 61814716.

[0732] SEQ ID NO:850 is the determined cDNA sequence for clone 61814720.

[0733] SEQ ID NO:851 is the determined cDNA sequence for clone 61814674.

[0734] SEQ ID NO:852 is the determined cDNA sequence for clone 61814676.

[0735] SEQ ID NO:853 is the determined cDNA sequence for clone 61814678.

[0736] SEQ ID NO:854 is the determined cDNA sequence for clone 61814721.

[0737] SEQ ID NO:855 is the determined cDNA sequence for clone 61814723.

[0738] SEQ ID NO:856 is the determined cDNA sequence for clone 61814725.

[0739] SEQ ID NO:857 is the determined cDNA sequence for clone 61814675.

[0740] SEQ ID NO:858 is the determined cDNA sequence for clone 61814677.

[0741] SEQ ID NO:859 is the determined cDNA sequence for clone 61814679.

[0742] SEQ ID NO:860 is the determined cDNA sequence for clone 61814722.

[0743] SEQ ID NO:861 is the determined cDNA sequence for clone 61814724.

[0744] SEQ ID NO:862 is the determined cDNA sequence for clone 61814726.

[0745] SEQ ID NO:863 is the determined cDNA sequence for clone 61814682.

[0746] SEQ ID NO:864 is the determined cDNA sequence for clone 61814729.

[0747] SEQ ID NO:865 is the determined cDNA sequence for clone 61814731.

[0748] SEQ ID NO:866 is the determined cDNA sequence for clone 61814681.

[0749] SEQ ID NO:867 is the determined cDNA sequence for clone 61814683.

[0750] SEQ ID NO:868 is the determined cDNA sequence for clone 61814685.

[0751] SEQ ID NO:869 is the determined cDNA sequence for clone 61814728.

[0752] SEQ ID NO:870 is the determined cDNA sequence for clone 61814730.

[0753] SEQ ID NO:871 is the determined cDNA sequence for clone 61814732.

[0754] SEQ ID NO:872 is the determined cDNA sequence for clone 61814686.

[0755] SEQ ID NO:873 is the determined cDNA sequence for clone 61814688.

[0756] SEQ ID NO:874 is the determined cDNA sequence for clone 61814690.

[0757] SEQ ID NO:875 is the determined cDNA sequence for clone 61814733.

[0758] SEQ ID NO:876 is the determined cDNA sequence for clone 61814735.

[0759] SEQ ID NO:877 is the determined cDNA sequence for clone 61814737.

[0760] SEQ ID NO:878 is the determined cDNA sequence for clone 61814687.

[0761] SEQ ID NO:879 is the determined cDNA sequence for clone 61814689.

[0762] SEQ ID NO:880 is the determined cDNA sequence for clone 61814691.

[0763] SEQ ID NO:881 is the determined cDNA sequence for clone 61814734.

[0764] SEQ ID NO:882 is the determined cDNA sequence for clone 61814736.

[0765] SEQ ID NO:883 is the determined cDNA sequence for clone 61814738.

[0766] SEQ ID NO:884 is the determined cDNA sequence for clone 61814692.

[0767] SEQ ID NO:885 is the determined cDNA sequence for clone 61814696.

[0768] SEQ ID NO:886 is the determined cDNA sequence for clone 61814743.

[0769] SEQ ID NO:887 is the determined cDNA sequence for clone 61814693.

[0770] SEQ ID NO:888 is the determined cDNA sequence for clone 61814695.

[0771] SEQ ID NO:889 is the determined cDNA sequence for clone 61814697.

[0772] SEQ ID NO:890 is the determined cDNA sequence for clone 61814740.

[0773] SEQ ID NO:891 is the determined cDNA sequence for clone 61814742.

[0774] SEQ ID NO:892 is the determined cDNA sequence for clone 61570440.

[0775] SEQ ID NO:893 is the determined cDNA sequence for clone 61570487.

[0776] SEQ ID NO:894 is the determined cDNA sequence for clone 61570489.

[0777] SEQ ID NO:895 is the determined cDNA sequence for clone 61570439.

[0778] SEQ ID NO:896 is the determined cDNA sequence for clone 61570486.

[0779] SEQ ID NO:897 is the determined cDNA sequence for clone 61570488.

[0780] SEQ ID NO:898 is the determined cDNA sequence for clone 61570490.

[0781] SEQ ID NO:899 is the determined cDNA sequence for clone 61570444.

[0782] SEQ ID NO:900 is the determined cDNA sequence for clone 61570446.

[0783] SEQ ID NO:901 is the determined cDNA sequence for clone 61570448.

[0784] SEQ ID NO:902 is the determined cDNA sequence for clone 61570491.

[0785] SEQ ID NO:903 is the determined cDNA sequence for clone 61570493.

[0786] SEQ ID NO:904 is the determined cDNA sequence for clone 61570495.

[0787] SEQ ID NO:905 is the determined cDNA sequence for clone 61570445.

[0788] SEQ ID NO:906 is the determined cDNA sequence for clone 61570449.

[0789] SEQ ID NO:907 is the determined cDNA sequence for clone 61570492.

[0790] SEQ ID NO:908 is the determined cDNA sequence for clone 61570494.

[0791] SEQ ID NO:909 is the determined cDNA sequence for clone 61570496.

[0792] SEQ ID NO:910 is the determined cDNA sequence for clone 61570450.

[0793] SEQ ID NO:911 is the determined cDNA sequence for clone 61570452.

[0794] SEQ ID NO:912 is the determined cDNA sequence for clone 61570454.

[0795] SEQ ID NO:913 is the determined cDNA sequence for clone 61570497.

[0796] SEQ ID NO:914 is the determined cDNA sequence for clone 61570499.

[0797] SEQ ID NO:915 is the determined cDNA sequence for clone 61570501.

[0798] SEQ ID NO:916 is the determined cDNA sequence for clone 61570451.

[0799] SEQ ID NO:917 is the determined cDNA sequence for clone 61570455.

[0800] SEQ ID NO:918 is the determined cDNA sequence for clone 61570498.

[0801] SEQ ID NO:919 is the determined cDNA sequence for clone 61570500.

[0802] SEQ ID NO:920 is the determined cDNA sequence for clone 61570456.

[0803] SEQ ID NO:921 is the determined cDNA sequence for clone 61570460.

[0804] SEQ ID NO:922 is the determined cDNA sequence for clone 61570503.

[0805] SEQ ID NO:923 is the determined cDNA sequence for clone 61570505.

[0806] SEQ ID NO:924 is the determined cDNA sequence for clone 61570507.

[0807] SEQ ID NO:925 is the determined cDNA sequence for clone 61570457.

[0808] SEQ ID NO:926 is the determined cDNA sequence for clone 61570459.

[0809] SEQ ID NO:927 is the determined cDNA sequence for clone 61570461.

[0810] SEQ ID NO:928 is the determined cDNA sequence for clone 61570504.

[0811] SEQ ID NO:929 is the determined cDNA sequence for clone 61570506.

[0812] SEQ ID NO:930 is the determined cDNA sequence for clone 61570508.

[0813] SEQ ID NO:931 is the determined cDNA sequence for clone 61570462.

[0814] SEQ ID NO:932 is the determined cDNA sequence for clone 61570464.

[0815] SEQ ID NO:933 is the determined cDNA sequence for clone 61570466.

[0816] SEQ ID NO:934 is the determined cDNA sequence for clone 61570509.

[0817] SEQ ID NO:935 is the determined cDNA sequence for clone 61570511.

[0818] SEQ ID NO:936 is the determined cDNA sequence for clone 61570513.

[0819] SEQ ID NO:937 is the determined cDNA sequence for clone 61570463.

[0820] SEQ ID NO:938 is the determined cDNA sequence for clone 61570465.

[0821] SEQ ID NO:939 is the determined cDNA sequence for clone 61570467.

[0822] SEQ ID NO:940 is the determined cDNA sequence for clone 61570514.

[0823] SEQ ID NO:941 is the determined cDNA sequence for clone 61570468.

[0824] SEQ ID NO:942 is the determined cDNA sequence for clone 61570470.

[0825] SEQ ID NO:943 is the determined cDNA sequence for clone 61570472.

[0826] SEQ ID NO:944 is the determined cDNA sequence for clone 61570515.

[0827] SEQ ID NO:945 is the determined cDNA sequence for clone 61570519.

[0828] SEQ ID NO:946 is the determined cDNA sequence for clone 61570469.

[0829] SEQ ID NO:947 is the determined cDNA sequence for clone 61570471.

[0830] SEQ ID NO:948 is the determined cDNA sequence for clone 61570473.

[0831] SEQ ID NO:949 is the determined cDNA sequence for clone 61570516.

[0832] SEQ ID NO:950 is the determined cDNA sequence for clone 61570518.

[0833] SEQ ID NO:951 is the determined cDNA sequence for clone 61570520.

[0834] SEQ ID NO:952 is the determined cDNA sequence for clone 0.61570474.

[0835] SEQ ID NO:953 is the determined cDNA sequence for clone 61570478.

[0836] SEQ ID NO:954 is the determined cDNA sequence for clone 61570521.

[0837] SEQ ID NO:955 is the determined cDNA sequence for clone 61570523.

[0838] SEQ ID NO:956 is the determined cDNA sequence for clone 61570525.

[0839] SEQ ID NO:957 is the determined cDNA sequence for clone 61570475.

[0840] SEQ ID NO:958 is the determined cDNA sequence for clone 61570477.

[0841] SEQ ID NO:959 is the determined cDNA sequence for clone 61570479.

[0842] SEQ ID NO:960 is the determined cDNA sequence for clone 61570522.

[0843] SEQ ID NO:961 is the determined cDNA sequence for clone 61570524.

[0844] SEQ ID NO:962 is the determined cDNA sequence for clone 61570526.

[0845] SEQ ID NO:963 is the determined cDNA sequence for clone 61570482.

[0846] SEQ ID NO:964 is the determined cDNA sequence for clone 61570484.

[0847] SEQ ID NO:965 is the determined cDNA sequence for clone 61570529.

[0848] SEQ ID NO:966 is the determined cDNA sequence for clone 61570531.

[0849] SEQ ID NO:967 is the determined cDNA sequence for clone 61570481.

[0850] SEQ ID NO:968 is the determined cDNA sequence for clone 61570485.

[0851] SEQ ID NO:969 is the determined cDNA sequence for clone 61570528.

[0852] SEQ ID NO:970 is the determined cDNA sequence for clone 61570530.

[0853] SEQ ID NO:971 is the determined cDNA sequence for clone 61871274.

[0854] SEQ ID NO:972 is the determined cDNA sequence for clone 61871276.

[0855] SEQ ID NO:973 is the determined cDNA sequence for clone 61871321.

[0856] SEQ ID NO:974 is the determined cDNA sequence for clone 61871323.

[0857] SEQ ID NO:975 is the determined cDNA sequence for clone 61871275.

[0858] SEQ ID NO:976 is the determined cDNA sequence for clone 61871277.

[0859] SEQ ID NO:977 is the determined cDNA sequence for clone 61871320.

[0860] SEQ ID NO:978 is the determined cDNA sequence for clone 61871322.

[0861] SEQ ID NO:979 is the determined cDNA sequence for clone 61871280.

[0862] SEQ ID NO:980 is the determined cDNA sequence for clone 61871282.

[0863] SEQ ID NO:981 is the determined cDNA sequence for clone 61871329.

[0864] SEQ ID NO:982 is the determined cDNA sequence for clone 61871279.

[0865] SEQ ID NO:983 is the determined cDNA sequence for clone 61871281.

[0866] SEQ ID NO:984 is the determined cDNA sequence for clone 61871283.

[0867] SEQ ID NO:985 is the determined cDNA sequence for clone 61871326.

[0868] SEQ ID NO:986 is the determined cDNA sequence for clone 61871328.

[0869] SEQ ID NO:987 is the determined cDNA sequence for clone 61871330.

[0870] SEQ ID NO:988 is the determined cDNA sequence for clone 61871284.

[0871] SEQ ID NO:989 is the determined cDNA sequence for clone 61871286.

[0872] SEQ ID NO:990 is the determined cDNA sequence for clone 61871331.

[0873] SEQ ID NO:991 is the determined cDNA sequence for clone 61871333.

[0874] SEQ ID NO:992 is the determined cDNA sequence for clone 61871335.

[0875] SEQ ID NO:993 is the determined cDNA sequence for clone 61871285.

[0876] SEQ ID NO:994 is the determined cDNA sequence for clone 61871287.

[0877] SEQ ID NO:995 is the determined cDNA sequence for clone 61871332.

[0878] SEQ ID NO:996 is the determined cDNA sequence for clone 61871334.

[0879] SEQ ID NO:997 is the determined cDNA sequence for clone 61871336.

[0880] SEQ ID NO:998 is the determined cDNA sequence for clone 61871290.

[0881] SEQ ID NO:999 is the determined cDNA sequence for clone 61871292.

[0882] SEQ ID NO:1000 is the determined cDNA sequence for clone 61871294.

[0883] SEQ ID NO:1001 is the determined cDNA sequence for clone 61871337.

[0884] SEQ ID NO:1002 is the determined cDNA sequence for clone 61871341.

[0885] SEQ ID NO:1003 is the determined cDNA sequence for clone 61871291.

[0886] SEQ ID NO:1004 is the determined cDNA sequence for clone 61871293.

[0887] SEQ ID NO:1005 is the determined cDNA sequence for clone 61871295.

[0888] SEQ ID NO:1006 is the determined cDNA sequence for clone 61871338.

[0889] SEQ ID NO:1007 is the determined cDNA sequence for clone 61871340.

[0890] SEQ ID NO:1008 is the determined cDNA sequence for clone 61871342.

[0891] SEQ ID NO:1009 is the determined cDNA sequence for clone 61871296.

[0892] SEQ ID NO:1010 is the determined cDNA sequence for clone 61871298.

[0893] SEQ ID NO: 1011 is the determined cDNA sequence for clone 61871300.

[0894] SEQ ID NO:1012 is the determined cDNA sequence for clone 61871343.

[0895] SEQ ID NO:1013 is the determined cDNA sequence for clone 61871347.

[0896] SEQ ID NO:1014 is the determined cDNA sequence for clone 61871297.

[0897] SEQ ID NO:1015 is the determined cDNA sequence for clone 61871299.

[0898] SEQ ID NO:1016 is the determined cDNA sequence for clone 61871301.

[0899] SEQ ID NO:1017 is the determined cDNA sequence for clone 61871344.

[0900] SEQ ID NO:1018 is the determined cDNA sequence for clone 61871346.

[0901] SEQ ID NO:1019 is the determined cDNA sequence for clone 61871348.

[0902] SEQ ID NO:1020 is the determined cDNA sequence for clone 61871302.

[0903] SEQ ID NO:1021 is the determined cDNA sequence for clone 61871304.

[0904] SEQ ID NO:1022 is the determined cDNA sequence for clone 61871306.

[0905] SEQ ID NO:1023 is the determined cDNA sequence for clone 61871349.

[0906] SEQ ID NO:1024 is the determined cDNA sequence for clone 61871351.

[0907] SEQ ID NO:1025 is the determined cDNA sequence for clone 61871303.

[0908] SEQ ID NO:1026 is the determined cDNA sequence for clone 61871305.

[0909] SEQ ID NO:1027 is the determined cDNA sequence for clone 61871307.

[0910] SEQ ID NO:1028 is the determined cDNA sequence for clone 61871350.

[0911] SEQ ID NO:1029 is the determined cDNA sequence for clone 61871352.

[0912] SEQ ID NO:1030 is the determined cDNA sequence for clone 61871354.

[0913] SEQ ID NO:1031 is the determined cDNA sequence for clone 61871308.

[0914] SEQ ID NO:1032 is the determined cDNA sequence for clone 61871310.

[0915] SEQ ID NO:1033 is the determined cDNA sequence for clone 61871312.

[0916] SEQ ID NO:1034 is the determined cDNA sequence for clone 61871355.

[0917] SEQ ID NO:1035 is the determined cDNA sequence for clone 61871357.

[0918] SEQ ID NO:1036 is the determined cDNA sequence for clone 61871359.

[0919] SEQ ID NO: 1037 is the determined cDNA sequence for clone 61871309.

[0920] SEQ ID NO: 1038 is the determined cDNA sequence for clone 61871311.

[0921] SEQ ID NO:1039 is the determined cDNA sequence for clone 61871313.

[0922] SEQ ID NO:1040 is the determined cDNA sequence for clone 61871358.

[0923] SEQ ID NO:1041 is the determined cDNA sequence for clone 61871360.

[0924] SEQ ID NO:1042 is the determined cDNA sequence for clone 61871314.

[0925] SEQ ID NO:1043 is the determined cDNA sequence for clone 61871316.

[0926] SEQ ID NO:1044 is the determined cDNA sequence for clone 61871318.

[0927] SEQ ID NO:1045 is the determined cDNA sequence for clone 61871363.

[0928] SEQ ID NO:1046 is the determined cDNA sequence for clone 61871315.

[0929] SEQ ID NO:1047 is the determined cDNA sequence for clone 61871317.

[0930] SEQ ID NO:1048 is the determined cDNA sequence for clone 61871319.

[0931] SEQ ID NO:1049 is the determined cDNA sequence for clone 61871362.

[0932] SEQ ID NO:1050 is the determined cDNA sequence for clone 61871364.

[0933] SEQ ID NO:1051 is the determined cDNA sequence for clone 62004994.

[0934] SEQ ID NO:1052 is the determined cDNA sequence for clone 62004996.

[0935] SEQ ID NO:1053 is the determined cDNA sequence for clone 62005043.

[0936] SEQ ID NO:1054 is the determined cDNA sequence for clone 62004993.

[0937] SEQ ID NO:1055 is the determined cDNA sequence for clone 62004995.

[0938] SEQ ID NO:1056 is the determined cDNA sequence for clone 62004997.

[0939] SEQ ID NO:1057 is the determined cDNA sequence for clone 62005040.

[0940] SEQ ID NO:1058 is the determined cDNA sequence for clone 62005042.

[0941] SEQ ID NO:1059 is the determined cDNA sequence for clone 62005044.

[0942] SEQ ID NO:1060 is the determined cDNA sequence for clone 62004998.

[0943] SEQ ID NO:1061 is the determined cDNA sequence for clone 62005000.

[0944] SEQ ID NO:1062 is the determined cDNA sequence for clone 62005045.

[0945] SEQ ID NO:1063 is the determined cDNA sequence for clone 62005047.

[0946] SEQ ID NO:1064 is the determined cDNA sequence for clone 62005049.

[0947] SEQ ID NO:1065 is the determined cDNA sequence for clone 62004999.

[0948] SEQ ID NO:1066 is the determined cDNA sequence for clone 62005001.

[0949] SEQ ID NO:1067 is the determined cDNA sequence for clone 62005003.

[0950] SEQ ID NO:1068 is the determined cDNA sequence for clone 62005046.

[0951] SEQ ID NO:1069 is the determined cDNA sequence for clone 62005048.

[0952] SEQ ID NO:1070 is the determined cDNA sequence for clone 62005050.

[0953] SEQ ID NO: 1071 is the determined cDNA sequence for clone 62005004.

[0954] SEQ ID NO:1072 is the determined cDNA sequence for clone 62005006.

[0955] SEQ ID NO:1073 is the determined cDNA sequence for clone 62005008.

[0956] SEQ ID NO:1074 is the determined cDNA sequence for clone 62005051.

[0957] SEQ ID NO:1075 is the determined cDNA sequence for clone 62005053.

[0958] SEQ ID NO:1076 is the determined cDNA sequence for clone 62005055.

[0959] SEQ ID NO:1077 is the determined cDNA sequence for clone 62005005.

[0960] SEQ ID NO:1078 is the determined cDNA sequence for clone 62005007.

[0961] SEQ ID NO:1079 is the determined cDNA sequence for clone 62005009.

[0962] SEQ ID NO:1080 is the determined cDNA sequence for clone 62005052.

[0963] SEQ ID NO:1081 is the determined cDNA sequence for clone 62005054.

[0964] SEQ ID NO:1082 is the determined cDNA sequence for clone 62005056.

[0965] SEQ ID NO:1083 is the determined cDNA sequence for clone 62005012.

[0966] SEQ ID NO: 1084 is the determined cDNA sequence for clone 62005014.

[0967] SEQ ID NO:1085 is the determined cDNA sequence for clone 62005057.

[0968] SEQ ID NO:1086 is the determined cDNA sequence for clone 62005059.

[0969] SEQ ID NO:1087 is the determined cDNA sequence for clone 62005011.

[0970] SEQ ID NO:1088 is the determined cDNA sequence for clone 62005013.

[0971] SEQ ID NO:1089 is the determined cDNA sequence for clone 62005015.

[0972] SEQ ID NO:1090 is the determined cDNA sequence for clone 62005058.

[0973] SEQ ID NO:1091 is the determined cDNA sequence for clone 62005060.

[0974] SEQ ID NO:1092 is the determined cDNA sequence for clone 62005062.

[0975] SEQ ID NO:1093 is the determined cDNA sequence for clone 62005016.

[0976] SEQ ID NO: 1094 is the determined cDNA sequence for clone 62005018.

[0977] SEQ ID NO:1095 is the determined cDNA sequence for clone 62005020.

[0978] SEQ ID NO:1096 is the determined cDNA sequence for clone 62005063.

[0979] SEQ ID NO:1097 is the determined cDNA sequence for clone 62005065.

[0980] SEQ ID NO: 1098 is the determined cDNA sequence for clone 62005067.

[0981] SEQ ID NO:1099 is the determined cDNA sequence for clone 62005017.

[0982] SEQ ID NO:1100 is the determined cDNA sequence for clone 62005019.

[0983] SEQ ID NO:1101 is the determined cDNA sequence for clone 62005021.

[0984] SEQ ID NO:1102 is the determined cDNA sequence for clone 62005064.

[0985] SEQ ID NO:1103 is the determined cDNA sequence for clone 62005066.

[0986] SEQ ID NO:1104 is the determined cDNA sequence for clone 62005068.

[0987] SEQ ID NO:1105 is the determined cDNA sequence for clone 62005022.

[0988] SEQ ID NO:1106 is the determined cDNA sequence for clone 62005024.

[0989] SEQ ID NO:1107 is the determined cDNA sequence for clone 62005026.

[0990] SEQ ID NO:1108 is the determined cDNA sequence for clone 62005069.

[0991] SEQ ID NO:1109 is the determined cDNA sequence for clone 62005071. SEQ ID NO:1110 is the determined cDNA sequence for clone 62005073.

[0992] SEQ ID NO:1111 is the determined cDNA sequence for clone 62005023.

[0993] SEQ ID NO:1112 is the determined cDNA sequence for clone 62005025.

[0994] SEQ ID NO:1113 is the determined cDNA sequence for clone 62005027.

[0995] SEQ ID NO:1114 is the determined cDNA sequence for clone 62005070.

[0996] SEQ ID NO:1115 is the determined cDNA sequence for clone 62005072.

[0997] SEQ ID NO:1116 is the determined cDNA sequence for clone 62005074.

[0998] SEQ ID NO:1117 is the determined cDNA sequence for clone 62005030.

[0999] SEQ ID NO:1118 is the determined cDNA sequence for clone 62005032.

[1000] SEQ ID NO:1119 is the determined cDNA sequence for clone 62005075.

[1001] SEQ ID NO:1120 is the determined cDNA sequence for clone 62005077.

[1002] SEQ ID NO:1121 is the determined cDNA sequence for clone 62005079.

[1003] SEQ ID NO:1122 is the determined cDNA sequence for clone 62005029.

[1004] SEQ ID NO:1123 is the determined cDNA sequence for clone 62005031.

[1005] SEQ ID NO:1124 is the determined cDNA sequence for clone 62005033.

[1006] SEQ ID NO:1125 is the determined cDNA sequence for clone 62005076.

[1007] SEQ ID NO:1126 is the determined cDNA sequence for clone 62005078.

[1008] SEQ ID NO:1127 is the determined cDNA sequence for clone 62005080.

[1009] SEQ ID NO:1128 is the determined cDNA sequence for clone 62005034.

[1010] SEQ ID NO:1129 is the determined cDNA sequence for clone 62005036.

[1011] SEQ ID NO:1130 is the determined cDNA sequence for clone 62005038.

[1012] SEQ ID NO:1131 is the determined cDNA sequence for clone 62005081.

[1013] SEQ ID NO:1132 is the determined cDNA sequence for clone 62005083.

[1014] SEQ ID NO:1133 is the determined cDNA sequence for clone 62005035.

[1015] SEQ ID NO:1134 is the determined cDNA sequence for clone 62005082.

[1016] SEQ ID NO:1135 is the determined cDNA sequence for clone 62005084.

[1017] SEQ ID NO:1136 is the determined cDNA sequence for clone 62004808.

[1018] SEQ ID NO:1137 is the determined cDNA sequence for clone 62004855.

[1019] SEQ ID NO:1138 is the determined cDNA sequence for clone 62004857.

[1020] SEQ ID NO:1139 is the determined cDNA sequence for clone 62004807.

[1021] SEQ ID NO:1140 is the determined cDNA sequence for clone 62004809.

[1022] SEQ ID NO:1141 is the determined cDNA sequence for clone 62004811.

[1023] SEQ ID NO:1142 is the determined cDNA sequence for clone 62004856.

[1024] SEQ ID NO:1143 is the determined cDNA sequence for clone 62004858.

[1025] SEQ ID NO:1144 is the determined cDNA sequence for clone 62004812.

[1026] SEQ ID NO:1145 is the determined cDNA sequence for clone 62004814.

[1027] SEQ ID NO:1146 is the determined cDNA sequence for clone 62004816.

[1028] SEQ ID NO:1147 is the determined cDNA sequence for clone 62004859.

[1029] SEQ ID NO:1148 is the determined cDNA sequence for clone 62004861.

[1030] SEQ ID NO:1149 is the determined cDNA sequence for clone 62004863.

[1031] SEQ ID NO:1150 is the determined cDNA sequence for clone 62004813.

[1032] SEQ ID NO:1151 is the determined cDNA sequence for clone 62004817.

[1033] SEQ ID NO:1152 is the determined cDNA sequence for clone 62004860.

[1034] SEQ ID NO:1153 is the determined cDNA sequence for clone 62004862.

[1035] SEQ ID NO:1154 is the determined cDNA sequence for clone 62004864.

[1036] SEQ ID NO:1155 is the determined cDNA sequence for clone 62004818.

[1037] SEQ ID NO:1156 is the determined cDNA sequence for clone 62004820.

[1038] SEQ ID NO:1157 is the determined cDNA sequence for clone 62004822.

[1039] SEQ ID NO:1158 is the determined cDNA sequence for clone 62004865.

[1040] SEQ ID NO:1159 is the determined cDNA sequence for clone 62004867.

[1041] SEQ ID NO:1160 is the determined cDNA sequence for clone 62004869.

[1042] SEQ ID NO:1161 is the determined cDNA sequence for clone 62004819.

[1043] SEQ ID NO:1162 is the determined cDNA sequence for clone 62004821.

[1044] SEQ ID NO:1163 is the determined cDNA sequence for clone 62004823.

[1045] SEQ ID NO:1164 is the determined cDNA sequence for clone 62004866.

[1046] SEQ ID NO:1165 is the determined cDNA sequence for clone 62004868.

[1047] SEQ ID NO:1166 is the determined cDNA sequence for clone 62004826.

[1048] SEQ ID NO:1167 is the determined cDNA sequence for clone 62004828.

[1049] SEQ ID NO:1168 is the determined cDNA sequence for clone 62004871.

[1050] SEQ ID NO:1169 is the determined cDNA sequence for clone 62004873.

[1051] SEQ ID NO: 170 is the determined cDNA sequence for clone 62004875.

[1052] SEQ ID NO:1171 is the determined cDNA sequence for clone 62004825.

[1053] SEQ ID NO:1172 is the determined cDNA sequence for clone 62004827.

[1054] SEQ ID NO:1173 is the determined cDNA sequence for clone 62004829.

[1055] SEQ ID NO:1174 is the determined cDNA sequence for clone 62004872.

[1056] SEQ ID NO:1175 is the determined cDNA sequence for clone 62004874.

[1057] SEQ ID NO:1176 is the determined cDNA sequence for clone 62004876.

[1058] SEQ ID NO:1177 is the determined cDNA sequence for clone 62004832.

[1059] SEQ ID NO:1178 is the determined cDNA sequence for clone 62004834.

[1060] SEQ ID NO:1179 is the determined cDNA sequence for clone 62004877.

[1061] SEQ ID NO:1180 is the determined cDNA sequence for clone 62004879.

[1062] SEQ ID NO:1181 is the determined cDNA sequence for clone 62004881.

[1063] SEQ ID NO:1182 is the determined cDNA sequence for clone 62004831.

[1064] SEQ ID NO:1183 is the determined cDNA sequence for clone 62004833.

[1065] SEQ ID NO:1184 is the determined cDNA sequence for clone 62004835.

[1066] SEQ ID NO:1185 is the determined cDNA sequence for clone 62004878.

[1067] SEQ ID NO:1186 is the determined cDNA sequence for clone 62004880.

[1068] SEQ ID NO:1187 is the determined cDNA sequence for clone 62004882.

[1069] SEQ ID NO:1188 is the determined cDNA sequence for clone 62004836.

[1070] SEQ ID NO:1189 is the determined cDNA sequence for clone 62004838.

[1071] SEQ ID NO:1190 is the determined cDNA sequence for clone 62004840.

[1072] SEQ ID NO:1191 is the determined cDNA sequence for clone 62004883.

[1073] SEQ ID NO:1192 is the determined cDNA sequence for clone 62004885.

[1074] SEQ ID NO:1193 is the determined cDNA sequence for clone 62004887.

[1075] SEQ ID NO:1194 is the determined cDNA sequence for clone 62004837.

[1076] SEQ ID NO:1195 is the determined cDNA sequence for clone 62004839.

[1077] SEQ ID NO:1196 is the determined cDNA sequence for clone 62004841.

[1078] SEQ ID NO:1197 is the determined cDNA sequence for clone 62004884.

[1079] SEQ ID NO:1198 is the determined cDNA sequence for clone 62004886.

[1080] SEQ ID NO:1199 is the determined cDNA sequence for clone 62004888.

[1081] SEQ ID NO:1200 is the determined cDNA sequence for clone 62004842.

[1082] SEQ ID NO:1201 is the determined cDNA sequence for clone 62004844.

[1083] SEQ ID NO:1202 is the determined cDNA sequence for clone 62004889.

[1084] SEQ ID NO:1203 is the determined cDNA sequence for clone 62004893.

[1085] SEQ ID NO:1204 is the determined cDNA sequence for clone 62004843.

[1086] SEQ ID NO:1205 is the determined cDNA sequence for clone 62004847.

[1087] SEQ ID NO:1206 is the determined cDNA sequence for clone 62004890.

[1088] SEQ ID NO:1207 is the determined cDNA sequence for clone 62004892.

[1089] SEQ ID NO:1208 is the determined cDNA sequence for clone 62004894.

[1090] SEQ ID NO:1209 is the determined cDNA sequence for clone 62004848.

[1091] SEQ ID NO:1210 is the determined cDNA sequence for clone 62004850.

[1092] SEQ ID NO:1211 is the determined cDNA sequence for clone 62004895.

[1093] SEQ ID NO:1212 is the determined cDNA sequence for clone 62004897.

[1094] SEQ ID NO:1213 is the determined cDNA sequence for clone 62004899.

[1095] SEQ ID NO:1214 is the determined cDNA sequence for clone 62004849.

[1096] SEQ ID NO:1215 is the determined cDNA sequence for clone 62004851.

[1097] SEQ ID NO:1216 is the determined cDNA sequence for clone 62004896.

[1098] SEQ ID NO:1217 is the determined cDNA sequence for clone 62004898.

[1099] SEQ ID NO:1218 is the determined cDNA sequence for clone 62005926.

[1100] SEQ ID NO:1219 is the determined cDNA sequence for clone 62005971.

[1101] SEQ ID NO:1220 is the determined cDNA sequence for clone 62005973.

[1102] SEQ ID NO:1221 is the determined cDNA sequence for clone 62005923.

[1103] SEQ ID NO:1222 is the determined cDNA sequence for clone 62005925.

[1104] SEQ ID NO:1223 is the determined cDNA sequence for clone 62005927.

[1105] SEQ ID NO:1224 is the determined cDNA sequence for clone 62005970.

[1106] SEQ ID NO:1225 is the determined cDNA sequence for clone 62005972.

[1107] SEQ ID NO:1226 is the determined cDNA sequence for clone 62005974.

[1108] SEQ ID NO:1227 is the determined cDNA sequence for clone 62005928.

[1109] SEQ ID NO:1228 is the determined cDNA sequence for clone 62005930.

[1110] SEQ ID NO:1229 is the determined cDNA sequence for clone 62005932.

[1111] SEQ ID NO:1230 is the determined cDNA sequence for clone 62005975.

[1112] SEQ ID NO:1231 is the determined cDNA sequence for clone 62005977.

[1113] SEQ ID NO:1232 is the determined cDNA sequence for clone 62005979.

[1114] SEQ ID NO:1233 is the determined cDNA sequence for clone 62005929.

[1115] SEQ ID NO:1234 is the determined cDNA sequence for clone 62005931.

[1116] SEQ ID NO:1235 is the determined cDNA sequence for clone 62005933.

[1117] SEQ ID NO:1236 is the determined cDNA sequence for clone 62005978.

[1118] SEQ ID NO:1237 is the determined cDNA sequence for clone 62005980.

[1119] SEQ ID NO:1238 is the determined cDNA sequence for clone 62005936.

[1120] SEQ ID NO:1239 is the determined cDNA sequence for clone 62005938.

[1121] SEQ ID NO:1240 is the determined cDNA sequence for clone 62005983.

[1122] SEQ ID NO:1241 is the determined cDNA sequence for clone 62005985.

[1123] SEQ ID NO:1242 is the determined cDNA sequence for clone 62005935.

[1124] SEQ ID NO:1243 is the determined cDNA sequence for clone 62005937.

[1125] SEQ ID NO:1244 is the determined cDNA sequence for clone 62005939.

[1126] SEQ ID NO:1245 is the determined cDNA sequence for clone 62005982.

[1127] SEQ ID NO:1246 is the determined cDNA sequence for clone 62005984.

[1128] SEQ ID NO:1247 is the determined cDNA sequence for clone 62005940.

[1129] SEQ ID NO:1248 is the determined cDNA sequence for clone 62005944.

[1130] SEQ ID NO:1249 is the determined cDNA sequence for clone 62005987.

[1131] SEQ ID NO:1250 is the determined cDNA sequence for clone 62005989.

[1132] SEQ ID NO:1251 is the determined cDNA sequence for clone 62005991.

[1133] SEQ ID NO:1252 is the determined cDNA sequence for clone 62005941.

[1134] SEQ ID NO:1253 is the determined cDNA sequence for clone 62005943.

[1135] SEQ ID NO:1254 is the determined cDNA sequence for clone 62005945.

[1136] SEQ ID NO:1255 is the determined cDNA sequence for clone 62005988.

[1137] SEQ ID NO:1256 is the determined cDNA sequence for clone 62005990.

[1138] SEQ ID NO:1257 is the determined cDNA sequence for clone 62005946.

[1139] SEQ ID NO:1258 is the determined cDNA sequence for clone 62005948.

[1140] SEQ ID NO:1259 is the determined cDNA sequence for clone 62005950.

[1141] SEQ ID NO:1260 is the determined cDNA sequence for clone 62005995.

[1142] SEQ ID NO:1261 is the determined cDNA sequence for clone 62005997.

[1143] SEQ ID NO:1262 is the determined cDNA sequence for clone 62005947.

[1144] SEQ ID NO:1263 is the determined cDNA sequence for clone 62005949.

[1145] SEQ ID NO:1264 is the determined cDNA sequence for clone 62005951.

[1146] SEQ ID NO:1265 is the determined cDNA sequence for clone 62005994.

[1147] SEQ ID NO:1266 is the determined cDNA sequence for clone 62005996.

[1148] SEQ ID NO:1267 is the determined cDNA sequence for clone 62005952.

[1149] SEQ ID NO:1268 is the determined cDNA sequence for clone 62005954.

[1150] SEQ ID NO:1269 is the determined cDNA sequence for clone 62006001.

[1151] SEQ ID NO:1270 is the determined cDNA sequence for clone 62006003.

[1152] SEQ ID NO:1271 is the determined cDNA sequence for clone 62005953.

[1153] SEQ ID NO:1272 is the determined cDNA sequence for clone 62005955.

[1154] SEQ ID NO:1273 is the determined cDNA sequence for clone 62005957.

[1155] SEQ ID NO:1274 is the determined cDNA sequence for clone 62006000.

[1156] SEQ ID NO:1275 is the determined cDNA sequence for clone 62006002.

[1157] SEQ ID NO:1276 is the determined cDNA sequence for clone 62005960.

[1158] SEQ ID NO:1277 is the determined cDNA sequence for clone 62005962.

[1159] SEQ ID NO:1278 is the determined cDNA sequence for clone 62006005.

[1160] SEQ ID NO:1279 is the determined cDNA sequence for clone 62006007.

[1161] SEQ ID NO:1280 is the determined cDNA sequence for clone 62006009.

[1162] SEQ ID NO:1281 is the determined cDNA sequence for clone 62005959.

[1163] SEQ ID NO:1282 is the determined cDNA sequence for clone 62005961.

[1164] SEQ ID NO:1283 is the determined cDNA sequence for clone 62005963.

[1165] SEQ ID NO:1284 is the determined cDNA sequence for clone 62006006.

[1166] SEQ ID NO:1285 is the determined cDNA sequence for clone 62006010.

[1167] SEQ ID NO:1286 is the determined cDNA sequence for clone 62005968.

[1168] SEQ ID NO:1287 is the determined cDNA sequence for clone 62006011.

[1169] SEQ ID NO:1288 is the determined cDNA sequence for clone 62006013.

[1170] SEQ ID NO:1289 is the determined cDNA sequence for clone 62006015.

[1171] SEQ ID NO:1290 is the determined cDNA sequence for clone 62005967.

[1172] SEQ ID NO:1291 is the determined cDNA sequence for clone 62006014.

[1173] SEQ ID NO:1292 is the determined cDNA sequence for clone 62004436.

[1174] SEQ ID NO:1293 is the determined cDNA sequence for clone 62004438.

[1175] SEQ ID NO:1294 is the determined cDNA sequence for clone 62004483.

[1176] SEQ ID NO:1295 is the determined cDNA sequence for clone 62004485.

[1177] SEQ ID NO:1296 is the determined cDNA sequence for clone 62004435.

[1178] SEQ ID NO:1297 is the determined cDNA sequence for clone 62004439.

[1179] SEQ ID NO:1298 is the determined cDNA sequence for clone 62004482.

[1180] SEQ ID NO:1299 is the determined cDNA sequence for clone 62004484.

[1181] SEQ ID NO:1300 is the determined cDNA sequence for clone 62004486.

[1182] SEQ ID NO:1301 is the determined cDNA sequence for clone 62004440.

[1183] SEQ ID NO:1302 is the determined cDNA sequence for clone 62004442.

[1184] SEQ ID NO:1303 is the determined cDNA sequence for clone 62004444.

[1185] SEQ ID NO:1304 is the determined cDNA sequence for clone 62004487.

[1186] SEQ ID NO:1305 is the determined cDNA sequence for clone 62004489.

[1187] SEQ ID NO:1306 is the determined cDNA sequence for clone 62004491.

[1188] SEQ ID NO:1307 is the determined cDNA sequence for clone 62004441.

[1189] SEQ ID NO:1308 is the determined cDNA sequence for clone 62004443.

[1190] SEQ ID NO:1309 is the determined cDNA sequence for clone 62004445.

[1191] SEQ ID NO:1310 is the determined cDNA sequence for clone 62004488.

[1192] SEQ ID NO:1311 is the determined cDNA sequence for clone 62004490.

[1193] SEQ ID NO:1312 is the determined cDNA sequence for clone 62004492.

[1194] SEQ ID NO:1313 is the determined cDNA sequence for clone 62004446.

[1195] SEQ ID NO:1314 is the determined cDNA sequence for clone 62004448.

[1196] SEQ ID NO:1315 is the determined cDNA sequence for clone 62004493.

[1197] SEQ ID NO:1316 is the determined cDNA sequence for clone 62004495.

[1198] SEQ ID NO:1317 is the determined cDNA sequence for clone 62004497.

[1199] SEQ ID NO:1318 is the determined cDNA sequence for clone 62004447.

[1200] SEQ ID NO:1319 is the determined cDNA sequence for clone 62004451.

[1201] SEQ ID NO:1320 is the determined cDNA sequence for clone 62004494.

[1202] SEQ ID NO:1321 is the determined cDNA sequence for clone 62004498.

[1203] SEQ ID NO:1322 is the determined cDNA sequence for clone 62004452.

[1204] SEQ ID NO:1323 is the determined cDNA sequence for clone 62004454.

[1205] SEQ ID NO:1324 is the determined cDNA sequence for clone 62004456.

[1206] SEQ ID NO:1325 is the determined cDNA sequence for clone 62004499.

[1207] SEQ ID NO:1326 is the determined cDNA sequence for clone 62004501.

[1208] SEQ ID NO:1327 is the determined cDNA sequence for clone 62004503.

[1209] SEQ ID NO:1328 is the determined cDNA sequence for clone 62004453.

[1210] SEQ ID NO:1329 is the determined cDNA sequence for clone 62004455.

[1211] SEQ ID NO:1330 is the determined cDNA sequence for clone 62004500.

[1212] SEQ ID NO:1331 is the determined cDNA sequence for clone 62004502.

[1213] SEQ ID NO:1332 is the determined cDNA sequence for clone 62004504.

[1214] SEQ ID NO:1333 is the determined cDNA sequence for clone 62004458.

[1215] SEQ ID NO:1334 is the determined cDNA sequence for clone 62004460.

[1216] SEQ ID NO:1335 is the determined cDNA sequence for clone 62004462.

[1217] SEQ ID NO:1336 is the determined cDNA sequence for clone 62004505.

[1218] SEQ ID NO:1337 is the determined cDNA sequence for clone 62004507.

[1219] SEQ ID NO:1338 is the determined cDNA sequence for clone 62004509.

[1220] SEQ ID NO:1339 is the determined cDNA sequence for clone 62004459.

[1221] SEQ ID NO:1340 is the determined cDNA sequence for clone 62004461.

[1222] SEQ ID NO:1341 is the determined cDNA sequence for clone 62004463.

[1223] SEQ ID NO:1342 is the determined cDNA sequence for clone 62004506.

[1224] SEQ ID NO:1343 is the determined cDNA sequence for clone 62004510.

[1225] SEQ ID NO:1344 is the determined cDNA sequence for clone 62004464.

[1226] SEQ ID NO:1345 is the determined cDNA sequence for clone 62004466.

[1227] SEQ ID NO:1346 is the determined cDNA sequence for clone 62004468.

[1228] SEQ ID NO:1347 is the determined cDNA sequence for clone 62004511.

[1229] SEQ ID NO:1348 is the determined cDNA sequence for clone 62004513.

[1230] SEQ ID NO:1349 is the determined cDNA sequence for clone 62004515.

[1231] SEQ ID NO:1350 is the determined cDNA sequence for clone 62004467.

[1232] SEQ ID NO:1351 is the determined cDNA sequence for clone 62004469.

[1233] SEQ ID NO:1352 is the determined cDNA sequence for clone 62004512.

[1234] SEQ ID NO:1353 is the determined cDNA sequence for clone 62004514.

[1235] SEQ ID NO:1354 is the determined cDNA sequence for clone 62004516.

[1236] SEQ ID NO:1355 is the determined cDNA sequence for clone 62004470.

[1237] SEQ ID NO:1356 is the determined cDNA sequence for clone 62004472.

[1238] SEQ ID NO:1357 is the determined cDNA sequence for clone 62004474.

[1239] SEQ ID NO:1358 is the determined cDNA sequence for clone 62004517.

[1240] SEQ ID NO:1359 is the determined cDNA sequence for clone 62004519.

[1241] SEQ ID NO:1360 is the determined cDNA sequence for clone 62004521.

[1242] SEQ ID NO:1361 is the determined cDNA sequence for clone 62004471.

[1243] SEQ ID NO:1362 is the determined cDNA sequence for clone 62004473.

[1244] SEQ ID NO:1363 is the determined cDNA sequence for clone 62004475.

[1245] SEQ ID NO:1364 is the determined cDNA sequence for clone 62004518.

[1246] SEQ ID NO:1365 is the determined cDNA sequence for clone 62004520.

[1247] SEQ ID NO:1366 is the determined cDNA sequence for clone 62004478.

[1248] SEQ ID NO:1367 is the determined cDNA sequence for clone 62004523.

[1249] SEQ ID NO:1368 is the determined cDNA sequence for clone 62004525.

[1250] SEQ ID NO:1369 is the determined cDNA sequence for clone 62004477.

[1251] SEQ ID NO:1370 is the determined cDNA sequence for clone 62004479.

[1252] SEQ ID NO:1371 is the determined cDNA sequence for clone 62004481.

[1253] SEQ ID NO:1372 is the determined cDNA sequence for clone 62004524.

[1254] SEQ ID NO:1373 is the determined cDNA sequence for clone 62004526.

[1255] SEQ ID NO:1374 is the determined cDNA sequence for clone 61589753.

[1256] SEQ ID NO:1375 is the determined cDNA sequence for clone 61589755.

[1257] SEQ ID NO:1376 is the determined cDNA sequence for clone 61589800.

[1258] SEQ ID NO:1377 is the determined cDNA sequence for clone 61589802.

[1259] SEQ ID NO:1378 is the determined cDNA sequence for clone 61589754.

[1260] SEQ ID NO:1379 is the determined cDNA sequence for clone 61589756.

[1261] SEQ ID NO:1380 is the determined cDNA sequence for clone 61589799.

[1262] SEQ ID NO:1381 is the determined cDNA sequence for clone 61589801.

[1263] SEQ ID NO:1382 is the determined cDNA sequence for clone 61589803.

[1264] SEQ ID NO:1383 is the determined cDNA sequence for clone 61589759.

[1265] SEQ ID NO:1384 is the determined cDNA sequence for clone 61589761.

[1266] SEQ ID NO:1385 is the determined cDNA sequence for clone 61589804.

[1267] SEQ ID NO:1386 is the determined cDNA sequence for clone 61589806.

[1268] SEQ ID NO:1387 is the determined cDNA sequence for clone 61589808.

[1269] SEQ ID NO:1388 is the determined cDNA sequence for clone 61589758.

[1270] SEQ ID NO:1389 is the determined cDNA sequence for clone 61589760.

[1271] SEQ ID NO:1390 is the determined cDNA sequence for clone 61589762.

[1272] SEQ ID NO:1391 is the determined cDNA sequence for clone 61589805.

[1273] SEQ ID NO:1392 is the determined cDNA sequence for clone 61589807.

[1274] SEQ ID NO:1393 is the determined cDNA sequence for clone 61589809.

[1275] SEQ ID NO:1394 is the determined cDNA sequence for clone 61589763.

[1276] SEQ ID NO:1395 is the determined cDNA sequence for clone 61589765.

[1277] SEQ ID NO:1396 is the determined cDNA sequence for clone 61589767.

[1278] SEQ ID NO:1397 is the determined cDNA sequence for clone 61589814.

[1279] SEQ ID NO:1398 is the determined cDNA sequence for clone 61589764.

[1280] SEQ ID NO:1399 is the determined cDNA sequence for clone 61589766.

[1281] SEQ ID NO:1400 is the determined cDNA sequence for clone 61589768.

[1282] SEQ ID NO:1401 is the determined cDNA sequence for clone 61589811.

[1283] SEQ ID NO:1402 is the determined cDNA sequence for clone 61589813.

[1284] SEQ ID NO:1403 is the determined cDNA sequence for clone 61589815.

[1285] SEQ ID NO:1404 is the determined cDNA sequence for clone 61589769.

[1286] SEQ ID NO:1405 is the determined cDNA sequence for clone 61589771.

[1287] SEQ ID NO:1406 is the determined cDNA sequence for clone 61589773.

[1288] SEQ ID NO:1407 is the determined cDNA sequence for clone 61589816.

[1289] SEQ ID NO:1408 is the determined cDNA sequence for clone 61589818.

[1290] SEQ ID NO:1409 is the determined cDNA sequence for clone 61589820.

[1291] SEQ ID NO:1410 is the determined cDNA sequence for clone 61589772.

[1292] SEQ ID NO:1411 is the determined cDNA sequence for clone 61589774.

[1293] SEQ ID NO:1412 is the determined cDNA sequence for clone 61589817.

[1294] SEQ ID NO:1413 is the determined cDNA sequence for clone 61589819.

[1295] SEQ ID NO:1414 is the determined cDNA sequence for clone 61589821.

[1296] SEQ ID NO:1415 is the determined cDNA sequence for clone 61589777.

[1297] SEQ ID NO:1416 is the determined cDNA sequence for clone 61589779.

[1298] SEQ ID NO: 1417 is the determined cDNA sequence for clone 61589822.

[1299] SEQ ID NO:1418 is the determined cDNA sequence for clone 61589826.

[1300] SEQ ID NO:1419 is the determined cDNA sequence for clone 61589776.

[1301] SEQ ID NO:1420 is the determined cDNA sequence for clone 61589778.

[1302] SEQ ID NO:1421 is the determined cDNA sequence for clone 61589780.

[1303] SEQ ID NO:1422 is the determined cDNA sequence for clone 61589825.

[1304] SEQ ID NO:1423 is the determined cDNA sequence for clone 61589827.

[1305] SEQ ID NO: 1424 is the determined cDNA sequence for clone 61589781.

[1306] SEQ ID NO:1425 is the determined cDNA sequence for clone 61589783.

[1307] SEQ ID NO:1426 is the determined cDNA sequence for clone 61589785.

[1308] SEQ ID NO:1427 is the determined cDNA sequence for clone 61589830.

[1309] SEQ ID NO:1428 is the determined cDNA sequence for clone 61589832.

[1310] SEQ ID NO:1429 is the determined cDNA sequence for clone 61589782.

[1311] SEQ ID NO:1430 is the determined cDNA sequence for clone 61589786.

[1312] SEQ ID NO:1431 is the determined cDNA sequence for clone 61589829.

[1313] SEQ ID NO:1432 is the determined cDNA sequence for clone 61589833.

[1314] SEQ ID NO:1433 is the determined cDNA sequence for clone 61589787.

[1315] SEQ ID NO:1434 is the determined cDNA sequence for clone 61589789.

[1316] SEQ ID NO:1435 is the determined cDNA sequence for clone 61589791.

[1317] SEQ ID NO:1436 is the determined cDNA sequence for clone 61589834.

[1318] SEQ ID NO:1437 is the determined cDNA sequence for clone 61589836.

[1319] SEQ ID NO:1438 is the determined cDNA sequence for clone 61589788.

[1320] SEQ ID NO:1439 is the determined cDNA sequence for clone 61589790.

[1321] SEQ ID NO:1440 is the determined cDNA sequence for clone 61589835.

[1322] SEQ ID NO:1441 is the determined cDNA sequence for clone 61589837.

[1323] SEQ ID NO:1442 is the determined cDNA sequence for clone 61589839.

[1324] SEQ ID NO:1443 is the determined cDNA sequence for clone 61589793.

[1325] SEQ ID NO:1444 is the determined cDNA sequence for clone 61589795.

[1326] SEQ ID NO:1445 is the determined cDNA sequence for clone 61589797.

[1327] SEQ ID NO: 1446 is the determined cDNA sequence for clone 61589840.

[1328] SEQ ID NO:1447 is the determined cDNA sequence for clone 61589842.

[1329] SEQ ID NO:1448 is the determined cDNA sequence for clone 61589844.

[1330] SEQ ID NO:1449 is the determined cDNA sequence for clone 61589794.

[1331] SEQ ID NO:1450 is the determined cDNA sequence for clone 61589796.

[1332] SEQ ID NO:1451 is the determined cDNA sequence for clone 61589798.

[1333] SEQ ID NO:1452 is the determined cDNA sequence for clone 61589841.

[1334] SEQ ID NO:1453 is the determined cDNA sequence for clone 61589843.

[1335] SEQ ID NO:1454 is the determined cDNA sequence for clone 61589939.

[1336] SEQ ID NO:1455 is the determined cDNA sequence for clone 61589986.

[1337] SEQ ID NO:1456 is the determined cDNA sequence for clone 61589988.

[1338] SEQ ID NO:1457 is the determined cDNA sequence for clone 61589938.

[1339] SEQ ID NO:1458 is the determined cDNA sequence for clone 61589940.

[1340] SEQ ID NO:1459 is the determined cDNA sequence for clone 61589942.

[1341] SEQ ID NO:1460 is the determined cDNA sequence for clone 61589985.

[1342] SEQ ID NO:1461 is the determined cDNA sequence for clone 61589987.

[1343] SEQ ID NO:1462 is the determined cDNA sequence for clone 61589989.

[1344] SEQ ID N0:1463 is the determined cDNA sequence for clone 61589943.

[1345] SEQ ID NO:1464 is the determined cDNA sequence for clone 61589945.

[1346] SEQ ID NO:1465 is the determined cDNA sequence for clone 61589947.

[1347] SEQ ID NO:1466 is the determined cDNA sequence for clone 61589990.

[1348] SEQ ID NO:1467 is the determined cDNA sequence for clone 61589994.

[1349] SEQ ID NO:1468 is the determined cDNA sequence for clone 61589944.

[1350] SEQ ID NO:1469 is the determined cDNA sequence for clone 61589946.

[1351] SEQ ID NO:1470 is the determined cDNA sequence for clone 61589948.

[1352] SEQ ID NO:1471 is the determined cDNA sequence for clone 61589991.

[1353] SEQ ID NO:1472 is the determined cDNA sequence for clone 61589993.

[1354] SEQ ID NO:1473 is the determined cDNA sequence for clone 61589949.

[1355] SEQ ID NO:1474 is the determined cDNA sequence for clone 61589951.

[1356] SEQ ID NO: 1475 is the determined cDNA sequence for clone 61589953.

[1357] SEQ ID NO:1476 is the determined cDNA sequence for clone 61589996.

[1358] SEQ ID NO:1477 is the determined cDNA sequence for clone 61589998.

[1359] SEQ ID NO:1478 is the determined cDNA sequence for clone 61590000.

[1360] SEQ ID NO:1479 is the determined cDNA sequence for clone 61589950.

[1361] SEQ ID NO:1480 is the determined cDNA sequence for clone 61589952.

[1362] SEQ ID NO:1481 is the determined cDNA sequence for clone 61589954.

[1363] SEQ ID NO:1482 is the determined cDNA sequence for clone 61589997.

[1364] SEQ ID NO:1483 is the determined cDNA sequence for clone 61590001.

[1365] SEQ ID NO:1484 is the determined cDNA sequence for clone 61589955.

[1366] SEQ ID NO:1485 is the determined cDNA sequence for clone 61589957.

[1367] SEQ ID NO:1486 is the determined cDNA sequence for clone 61589959.

[1368] SEQ ID NO:1487 is the determined cDNA sequence for clone 61590002.

[1369] SEQ ID NO:1488 is the determined cDNA sequence for clone 61590004.

[1370] SEQ ID NO:1489 is the determined cDNA sequence for clone 61590006.

[1371] SEQ ID NO:1490 is the determined cDNA sequence for clone 61589956.

[1372] SEQ ID NO:1491 is the determined cDNA sequence for clone 61589958.

[1373] SEQ ID NO:1492 is the determined cDNA sequence for clone 61589960.

[1374] SEQ ID NO:1493 is the determined cDNA sequence for clone 61590003.

[1375] SEQ ID NO:1494 is the determined cDNA sequence for clone 61590007.

[1376] SEQ ID NO:1495 is the determined cDNA sequence for clone 61589961.

[1377] SEQ ID NO:1496 is the determined cDNA sequence for clone 61589963.

[1378] SEQ ID NO:1497 is the determined cDNA sequence for clone 61589965.

[1379] SEQ ID NO:1498 is the determined cDNA sequence for clone 61590008.

[1380] SEQ ID NO:1499 is the determined cDNA sequence for clone 61590010.

[1381] SEQ ID NO:1500 is the determined cDNA sequence for clone 61590012.

[1382] SEQ ID NO:1501 is the determined cDNA sequence for clone 61589962.

[1383] SEQ ID NO:1502 is the determined cDNA sequence for clone 61589964.

[1384] SEQ ID NO:1503 is the determined cDNA sequence for clone 61589966.

[1385] SEQ ID NO:1504 is the determined cDNA sequence for clone 61590009.

[1386] SEQ ID NO:1505 is the determined cDNA sequence for clone 61590011.

[1387] SEQ ID NO:1506 is the determined cDNA sequence for clone 61590013.

[1388] SEQ ID NO:1507 is the determined cDNA sequence for clone 61589967.

[1389] SEQ ID NO:1508 is the determined cDNA sequence for clone 61589969.

[1390] SEQ ID NO:1509 is the determined cDNA sequence for clone 61589971.

[1391] SEQ ID NO:1510 is the determined cDNA sequence for clone 61590014.

[1392] SEQ ID NO:1511 is the determined cDNA sequence for clone 61590018.

[1393] SEQ ID NO:1512 is the determined cDNA sequence for clone 61589968.

[1394] SEQ ID NO:1513 is the determined cDNA sequence for clone 61589970.

[1395] SEQ ID NO:1514 is the determined cDNA sequence for clone 61589972.

[1396] SEQ ID NO:1515 is the determined cDNA sequence for clone 61590015.

[1397] SEQ ID NO:1516 is the determined cDNA sequence for clone 61590017.

[1398] SEQ ID NO:1517 is the determined cDNA sequence for clone 61590019.

[1399] SEQ ID NO:1518 is the determined cDNA sequence for clone 61589973.

[1400] SEQ ID NO:1519 is the determined cDNA sequence for clone 61590020.

[1401] SEQ ID NO:1520 is the determined cDNA sequence for clone 61590022.

[1402] SEQ ID NO:1521 is the determined cDNA sequence for clone 61590024.

[1403] SEQ ID NO:1522 is the determined cDNA sequence for clone 61589974.

[1404] SEQ ID NO:1523 is the determined cDNA sequence for clone 61589976.

[1405] SEQ ID NO:1524 is the determined cDNA sequence for clone 61589978.

[1406] SEQ ID NO:1525 is the determined cDNA sequence for clone 61590021.

[1407] SEQ ID NO:1526 is the determined cDNA sequence for clone 61590023.

[1408] SEQ ID NO:1527 is the determined cDNA sequence for clone 61590025.

[1409] SEQ ID NO:1528 is the determined cDNA sequence for clone 61589979.

[1410] SEQ ID NO:1529 is the determined cDNA sequence for clone 61589981.

[1411] SEQ ID NO:1530 is the determined cDNA sequence for clone 61589983.

[1412] SEQ ID NO:1531 is the determined cDNA sequence for clone 61590026.

[1413] SEQ ID NO:1532 is the determined cDNA sequence for clone 61590028.

[1414] SEQ ID NO:1533 is the determined cDNA sequence for clone 61590030.

[1415] SEQ ID NO:1534 is the determined cDNA sequence for clone 61589980.

[1416] SEQ ID NO:1535 is the determined cDNA sequence for clone 61589982.

[1417] SEQ ID NO:1536 is the determined cDNA sequence for clone 61589984.

[1418] SEQ ID NO:1537 is the determined cDNA sequence for clone 61590027.

[1419] SEQ ID NO: 1538 is the determined cDNA sequence for clone 61590029.

[1420] SEQ ID NO:1539 is the determined cDNA sequence for clone 61931738.

[1421] SEQ ID NO:1540 is the determined cDNA sequence for clone 61931740.

[1422] SEQ ID NO:1541 is the determined cDNA sequence for clone 61931785.

[1423] SEQ ID NO:1542 is the determined cDNA sequence for clone 61931787.

[1424] SEQ ID NO:1543 is the determined cDNA sequence for clone 61931739.

[1425] SEQ ID NO:1544 is the determined cDNA sequence for clone 61931741.

[1426] SEQ ID NO:1545 is the determined cDNA sequence for clone 61931784.

[1427] SEQ ID NO:1546 is the determined cDNA sequence for clone 61931786.

[1428] SEQ ID NO:1547 is the determined cDNA sequence for clone 61931742.

[1429] SEQ ID NO:1548 is the determined cDNA sequence for clone 61931744.

[1430] SEQ ID NO:1549 is the determined cDNA sequence for clone 61931746.

[1431] SEQ ID NO:1550 is the determined cDNA sequence for clone 61931789.

[1432] SEQ ID NO:1551 is the determined cDNA sequence for clone 61931791.

[1433] SEQ ID NO:1552 is the determined cDNA sequence for clone 61931793.

[1434] SEQ ID NO:1553 is the determined cDNA sequence for clone 61931745.

[1435] SEQ ID NO:1554 is the determined cDNA sequence for clone 61931747.

[1436] SEQ ID NO:1555 is the determined cDNA sequence for clone 61931790.

[1437] SEQ ID NO:1556 is the determined cDNA sequence for clone 61931792.

[1438] SEQ ID NO:1557 is the determined cDNA sequence for clone 61931794.

[1439] SEQ ID NO:1558 is the determined cDNA sequence for clone 61931748.

[1440] SEQ ID NO:1559 is the determined cDNA sequence for clone 61931752.

[1441] SEQ ID NO:1560 is the determined cDNA sequence for clone 61931795.

[1442] SEQ ID NO:1561 is the determined cDNA sequence for clone 61931797.

[1443] SEQ ID NO:1562 is the determined cDNA sequence for clone 61931799.

[1444] SEQ ID NO:1563 is the determined cDNA sequence for clone 61931751.

[1445] SEQ ID NO:1564 is the determined cDNA sequence for clone 61931753.

[1446] SEQ ID NO:1565 is the determined cDNA sequence for clone 61931796.

[1447] SEQ ID NO:1566 is the determined cDNA sequence for clone 61931798.

[1448] SEQ ID NO:1567 is the determined cDNA sequence for clone 61931800.

[1449] SEQ ID NO:1568 is the determined cDNA sequence for clone 61931754.

[1450] SEQ ID NO:1569 is the determined cDNA sequence for clone 61931756.

[1451] SEQ ID NO:1570 is the determined cDNA sequence for clone 61931758.

[1452] SEQ ID NO:1571 is the determined cDNA sequence for clone 61931801.

[1453] SEQ ID NO:1572 is the determined cDNA sequence for clone 61931803.

[1454] SEQ ID NO:1573 is the-determined cDNA sequence for clone 61931805.

[1455] SEQ ID NO:1574 is the determined cDNA sequence for clone 61931755.

[1456] SEQ ID NO:1575 is the determined cDNA sequence for clone 61931757.

[1457] SEQ ID NO:1576 is the determined cDNA sequence for clone 61931759.

[1458] SEQ ID NO:1577 is the determined cDNA sequence for clone 61931802.

[1459] SEQ ID NO:1578 is the determined cDNA sequence for clone 61931804.

[1460] SEQ ID NO:1579 is the determined cDNA sequence for clone 61931806.

[1461] SEQ ID NO:1580 is the determined cDNA sequence for clone 61931760.

[1462] SEQ ID NO:1581 is the determined cDNA sequence for clone 61931762.

[1463] SEQ ID NO:1582 is the determined cDNA sequence for clone 61931764.

[1464] SEQ ID NO:1583 is the determined cDNA sequence for clone 61931809.

[1465] SEQ ID NO:1584 is the determined cDNA sequence for clone 61931811.

[1466] SEQ ID NO:1585 is the determined cDNA sequence for clone 61931761.

[1467] SEQ ID NO:1586 is the determined cDNA sequence for clone 61931763.

[1468] SEQ ID NO:1587 is the determined cDNA sequence for clone 61931765.

[1469] SEQ ID NO:1588 is the determined cDNA sequence for clone 61931808.

[1470] SEQ ID NO:1589 is the determined cDNA sequence for clone 61931810.

[1471] SEQ ID NO:1590 is the determined cDNA sequence for clone 61931812.

[1472] SEQ ID NO:1591 is the determined cDNA sequence for clone 61931768.

[1473] SEQ ID NO:1592 is the determined cDNA sequence for clone 61931770.

[1474] SEQ ID NO:1593 is the determined cDNA sequence for clone 61931813.

[1475] SEQ ID NO:1594 is the determined cDNA sequence for clone 61931815.

[1476] SEQ ID NO:1595 is the determined cDNA sequence for clone 61931817.

[1477] SEQ ID NO:1596 is the determined cDNA sequence for clone 61931767.

[1478] SEQ ID NO:1597 is the determined cDNA sequence for clone 61931769.

[1479] SEQ ID NO:1598 is the determined cDNA sequence for clone 61931771.

[1480] SEQ ID NO:1599 is the determined cDNA sequence for clone 61931814.

[1481] SEQ ID NO:1600 is the determined cDNA sequence for clone 61931816.

[1482] SEQ ID NO:1601 is the determined cDNA sequence for clone 61931818.

[1483] SEQ ID NO:1602 is the determined cDNA sequence for clone 61931772.

[1484] SEQ ID NO:1603 is the determined cDNA sequence for clone 61931774.

[1485] SEQ ID NO:1604 is the determined cDNA sequence for clone 61931776.

[1486] SEQ ID NO:1605 is the determined cDNA sequence for clone 61931821.

[1487] SEQ ID NO:1606 is the determined cDNA sequence for clone 61931823.

[1488] SEQ ID NO:1607 is the determined cDNA sequence for clone 61931773.

[1489] SEQ ID NO:1608 is the determined cDNA sequence for clone 61931775.

[1490] SEQ ID NO:1609 is the determined cDNA sequence for clone 61931777.

[1491] SEQ ID NO:1610 is the determined cDNA sequence for clone 61931820.

[1492] SEQ ID NO:1611 is the determined cDNA sequence for clone 61931822.

[1493] SEQ ID NO:1612 is the determined cDNA sequence for clone 61931824.

[1494] SEQ ID NO:1613 is the determined cDNA sequence for clone 61931778.

[1495] SEQ ID NO:1614 is the determined cDNA sequence for clone 61931780.

[1496] SEQ ID NO:1615 is the determined cDNA sequence for clone 61931782.

[1497] SEQ ID NO:1616 is the determined cDNA sequence for clone 61931825.

[1498] SEQ ID NO:1617 is the determined cDNA sequence for clone 61931827.

[1499] SEQ ID NO:1618 is the determined cDNA sequence for clone 61931829.

[1500] SEQ ID NO:1619 is the determined cDNA sequence for clone 61931779.

[1501] SEQ ID NO:1620 is the determined cDNA sequence for clone 61931781.

[1502] SEQ ID NO:1621 is the determined cDNA sequence for clone 61931783.

[1503] SEQ ID NO:1622 is the determined cDNA sequence for clone 61931826.

[1504] SEQ ID NO:1623 is the determined cDNA sequence for clone 61931828.

[1505] SEQ ID NO:1624 is the determined cDNA sequence for clone 61932017.

[1506] SEQ ID NO: 1625 is the determined cDNA sequence for clone 61932019.

[1507] SEQ ID NO:1626 is the determined cDNA sequence for clone 61932064.

[1508] SEQ ID NO:1627 is the determined cDNA sequence for clone 61932066.

[1509] SEQ ID NO:1628 is the determined cDNA sequence for clone 61932018.

[1510] SEQ ID NO:1629 is the determined cDNA sequence for clone 61932020.

[1511] SEQ ID NO:1630 is the determined cDNA sequence for clone 61932065.

[1512] SEQ ID NO:1631 is the determined cDNA sequence for clone 61932067.

[1513] SEQ ID NO:1632 is the determined cDNA sequence for clone 61932021.

[1514] SEQ ID NO: 1633 is the determined cDNA sequence for clone 61932023.

[1515] SEQ ID NO:1634 is the determined cDNA sequence for clone 61932025.

[1516] SEQ ID NO:1635 is the determined cDNA sequence for clone 61932068.

[1517] SEQ ID NO:1636 is the determined cDNA sequence for clone 61932070.

[1518] SEQ ID NO:1637 is the determined cDNA sequence for clone 61932072.

[1519] SEQ ID NO:1638 is the determined cDNA sequence for clone 61932024.

[1520] SEQ ID NO:1639 is the determined cDNA sequence for clone 61932026.

[1521] SEQ ID NO:1640 is the determined cDNA sequence for clone 61932073.

[1522] SEQ ID NO:1641 is the determined cDNA sequence for clone 61932027.

[1523] SEQ ID NO:1642 is the determined cDNA sequence for clone 61932031.

[1524] SEQ ID NO:1643 is the determined cDNA sequence for clone 61932074.

[1525] SEQ ID NO:1644 is the determined cDNA sequence for clone 61932076.

[1526] SEQ ID NO:1645 is the determined cDNA sequence for clone 61932078.

[1527] SEQ ID NO:1646 is the determined cDNA sequence for clone 61932028.

[1528] SEQ ID NO:1647 is the determined cDNA sequence for clone 61932030.

[1529] SEQ ID NO:1648 is the determined cDNA sequence for clone 61932075.

[1530] SEQ ID NO:1649 is the determined cDNA sequence for clone 61932077.

[1531] SEQ ID NO:1650 is the determined cDNA sequence for clone 61932079.

[1532] SEQ ID NO:1651 is the determined cDNA sequence for clone 61932035.

[1533] SEQ ID NO:1652 is the determined cDNA sequence for clone 61932037.

[1534] SEQ ID NO:1653 is the determined cDNA sequence for clone 61932080.

[1535] SEQ ID NO:1654 is the determined cDNA sequence for clone 61932082.

[1536] SEQ ID NO:1655 is the determined cDNA sequence for clone 61932084.

[1537] SEQ ID NO:1656 is the determined cDNA sequence for clone 61932038.

[1538] SEQ ID NO:1657 is the determined cDNA sequence for clone 61932083.

[1539] SEQ ID NO:1658 is the determined cDNA sequence for clone 61932085.

[1540] SEQ ID NO:1659 is the determined cDNA sequence for clone 61932039.

[1541] SEQ ID NO:1660 is the determined cDNA sequence for clone 61932043.

[1542] SEQ ID NO:1661 is the determined cDNA sequence for clone 61932086.

[1543] SEQ ID NO:1662 is the determined cDNA sequence for clone 61932088.

[1544] SEQ ID NO:1663 is the determined cDNA sequence for clone 61932090.

[1545] SEQ ID NO:1664 is the determined cDNA sequence for clone 61932040.

[1546] SEQ ID NO:1665 is the determined cDNA sequence for clone 61932042.

[1547] SEQ ID NO:1666 is the determined cDNA sequence for clone 61932044.

[1548] SEQ ID NO:1667 is the determined cDNA sequence for clone 61932089.

[1549] SEQ ID NO:1668 is the determined cDNA sequence for clone 61932045.

[1550] SEQ ID NO:1669 is the determined cDNA sequence for clone 61932047.

[1551] SEQ ID NO:1670 is the determined cDNA sequence for clone 61932049.

[1552] SEQ ID NO:1671 is the determined cDNA sequence for clone 61932092.

[1553] SEQ ID NO:1672 is the determined cDNA sequence for clone 61932096.

[1554] SEQ ID NO:1673 is the determined cDNA sequence for clone 61932046.

[1555] SEQ ID NO:1674 is the determined cDNA sequence for clone 61932050.

[1556] SEQ ID NO:1675 is the determined cDNA sequence for clone 61932093.

[1557] SEQ ID NO:1676 is the determined cDNA sequence for clone 61932095.

[1558] SEQ ID NO:1677 is the determined cDNA sequence for clone 61932051.

[1559] SEQ ID NO:1678 is the determined cDNA sequence for clone 61932053.

[1560] SEQ ID NO:1679 is the determined cDNA sequence for clone 61932055.

[1561] SEQ ID NO:1680 is the determined cDNA sequence for clone 61932098.

[1562] SEQ ID NO:1681 is the determined cDNA sequence for clone 61932100.

[1563] SEQ ID NO:1682 is the determined cDNA sequence for clone 61932102.

[1564] SEQ ID NO:1683 is the determined cDNA sequence for clone 61932052.

[1565] SEQ ID NO:1684 is the determined cDNA sequence for clone 61932054.

[1566] SEQ ID NO:1685 is the determined cDNA sequence for clone 61932056.

[1567] SEQ ID NO:1686 is the determined cDNA sequence for clone 61932101.

[1568] SEQ ID NO:1687 is the determined cDNA sequence for clone 61932103.

[1569] SEQ ID NO:1688 is the determined cDNA sequence for clone 61932059.

[1570] SEQ ID NO:1689 is the determined cDNA sequence for clone 61932061.

[1571] SEQ ID NO:1690 is the determined cDNA sequence for clone 61932106.

[1572] SEQ ID NO:1691 is the determined cDNA sequence for clone 61932062.

[1573] SEQ ID NO:1692 is the determined cDNA sequence for clone 61932105.

[1574] SEQ ID NO:1693 is the determined cDNA sequence for clone KAM202 G1, also referred to as K1549P.

[1575] SEQ ID NO:1694 is the determined cDNA sequence for clone SAM113 D8.

[1576] SEQ ID NO:1695 is the determined cDNA sequence for clone KAM207 D12.

[1577] SEQ ID NO:1696 is the determined cDNA sequence for clone KAM217 E6.

[1578] SEQ ID NO:1697 is the determined cDNA sequence for clone SAM121 C3.

[1579] SEQ ID NO:1698 is the determined cDNA sequence for clone LLAM27 D7.

[1580] SEQ ID NO:1699 is the determined cDNA sequence for clone SAM113 G7.

[1581] SEQ ID NO:1700 is the determined cDNA sequence for clone SAM115 F7.

[1582] SEQ ID NO:1701 is the determined cDNA sequence for clone DAM216 A10.

[1583] SEQ ID NO:1702 is the determined cDNA sequence for clone KAM202 C11, also referred to as K1548P.

[1584] SEQ ID NO:1703 is the determined cDNA sequence for clone SAM114 H4.

[1585] SEQ ID NO:1704 is the determined cDNA sequence for clone KAM210 C2.

[1586] SEQ ID NO:1705 is the determined cDNA sequence for clone SAM117 E10.

[1587] SEQ ID NO:1706 is the determined cDNA sequence for clone KAM218 D3.

[1588] SEQ ID NO:1707 is the determined cDNA sequence for clone KAM208 C12.

[1589] SEQ ID NO:1708 is the determined cDNA sequence for clone KAM202 B1.

[1590] SEQ ID NO:1709 is the determined cDNA sequence for clone KAM202 E8.

[1591] SEQ ID NO: 1710 is the determined cDNA sequence for clone KAM203 G5.

[1592] SEQ ID NO:1711 is the determined cDNA sequence for clone KAM206 D6.

[1593] SEQ ID NO:1712 is the determined cDNA sequence for clone KAM218 D7.

[1594] SEQ ID NO:1713 is the determined cDNA sequence for clone KAM209 H9.

[1595] SEQ ID NO:1714 is the determined cDNA sequence for clone KAM217 D2.

[1596] SEQ ID NO:1715 is the determined cDNA sequence for clone KAM208 F8.

[1597] SEQ ID NO:1716 is the determined cDNA sequence for clone KAM202 B7.

[1598] SEQ ID NO:1717 is the determined cDNA sequence for clone KAM212 A9.

[1599] SEQ ID NO:1718 is the determined cDNA sequence for clone KAM218 G1.

[1600] SEQ ID NO:1719 is the determined cDNA sequence for clone KAM217 D7.

[1601] SEQ ID NO:1720 is the determined cDNA sequence for clone KAM218 C10.

[1602] SEQ ID NO:1721 is the determined cDNA sequence for clone KAM201 C7.

[1603] SEQ ID NO:1722 is the determined cDNA sequence for clone SAM131 E12.

[1604] SEQ ID NO:1723 is the determined cDNA sequence for clone KAM214 B10.

[1605] SEQ ID NO:1724 is the determined cDNA sequence for clone LLAM25 B11.

[1606] SEQ ID NO:1725 is the determined cDNA sequence for clone LLAM29 E3.

[1607] SEQ ID NO:1726 is the determined cDNA sequence for clone SAMl16 B3.

[1608] SEQ ID NO:1727 is the determined cDNA sequence for clone KAM218 A9.

[1609] SEQ ID NO:1728 is the determined cDNA sequence for clone KAM208 B7.

[1610] SEQ ID NO:1729 is the determined cDNA sequence for clone LLAM28 B4.

[1611] SEQ ID NO:1730 is the determined cDNA sequence for clone KAM207 C12.

[1612] SEQ ID NO:1731 is the determined cDNA sequence for clone LLAM25 B6.

[1613] SEQ ID NO:1732 is the determined cDNA sequence for clone LLAM25 B1.

[1614] SEQ ID NO:1733 is the determined cDNA sequence for clone KAM211 H5.

[1615] SEQ ID NO:1734 is the determined cDNA sequence for clone LLAM29 H3.

[1616] SEQ ID NO:1735 is the determined cDNA sequence for clone LLAM25 A8.

[1617] SEQ ID NO:1736 is the determined cDNA sequence for clone KAM217 H_{11.}

[1618] SEQ ID NO:1737 is the determined cDNA sequence for clone SAM114 A8.

[1619] SEQ ID NO:1738 is the determined cDNA sequence for clone SAM129 B11.

[1620] SEQ ID NO:1739 is the determined cDNA sequence for clone KAM215 H1.

[1621] SEQ ID NO:1740 is the determined cDNA sequence for clone KAM207 D7.

[1622] SEQ ID NO:1741 is the determined cDNA sequence for clone KAM217 D3.

[1623] SEQ ID NO:1742 is the determined cDNA sequence for clone KAM215 G3.

[1624] SEQ ID NO:1743 is the determined cDNA sequence for clone KAM202 H11.

[1625] SEQ ID NO:1744 is the determined cDNA sequence for clone KAM209 C5.

[1626] SEQ ID NO:1745 is the determined cDNA sequence for clone KAM205 D7.

[1627] SEQ ID NO:1746 is the determined cDNA sequence for clone KAM211 G11.

[1628] SEQ ID NO:1747 is the determined cDNA sequence for clone KAM200 D7.

[1629] SEQ ID NO:1748 is the determined cDNA sequence for clone KAM209 F3.

[1630] SEQ ID NO:1749 is the determined cDNA sequence for clone KAM212 B11.

[1631] SEQ ID NO:1750 is the determined cDNA sequence for clone KAM212 D10.

[1632] SEQ ID NO:1751 is the determined cDNA sequence for clone KAM200 F1.

[1633] SEQ ID NO:1752 is the determined cDNA sequence for clone KAM217 H7.

[1634] SEQ ID NO:1753 is the determined cDNA sequence for clone SAM120 G5.

[1635] SEQ ID NO:1754 is the determined cDNA sequence for clone SAM129 G1.

[1636] SEQ ID NO:1755 is the determined cDNA sequence for clone KAM205 A12.

[1637] SEQ ID NO:1756 is the determined cDNA sequence for clone KAM202 D8.

[1638] SEQ ID NO: 1757 is the determined cDNA sequence for clone KAM205 C7.

[1639] SEQ ID NO:1758 is the determined cDNA sequence for clone LLAM26 F3.

[1640] SEQ ID NO:1759 is the determined cDNA sequence for clone KAM218 G8.

[1641] SEQ ID NO:1760 is the determined cDNA sequence for clone KAM213 A4.

[1642] SEQ ID NO:1761 is the determined cDNA sequence for clone SAM116 E7.

[1643] SEQ ID NO:1762 is the determined cDNA sequence for clone SAM127 D8.

[1644] SEQ ID NO:1763 is the determined cDNA sequence for clone KAM211 H4.

[1645] SEQ ID NO:1764 is the determined cDNA sequence for clone KAM216 C3.

[1646] SEQ ID NO:1765 is the determined cDNA sequence for clone KAM213 F11.

[1647] SEQ ID NO:1766 is the determined cDNA sequence for clone KAM218 F4.

[1648] SEQ ID NO:1767 is the determined cDNA sequence for clone KAM202 A9.

[1649] SEQ ID NO: 1768 is the determined cDNA sequence for clone KAM217 E1.

[1650] SEQ ID NO:1769 is the determined cDNA sequence for clone KAM205 C6, also referred to as K1551 P.

[1651] SEQ ID NO:1770 is the determined cDNA sequence for clone KAM203 B8.

[1652] SEQ ID NO:1771 is the determined cDNA sequence for clone KAM210 C8.

[1653] SEQ ID NO:1772 is the determined cDNA sequence for clone LLAM25 D8.

[1654] SEQ ID NO:1773 is the determined cDNA sequence for clone KAM204 G2.

[1655] SEQ ID NO:1774 is the determined cDNA sequence for clone KAM218 C3.

[1656] SEQ ID NO:1775 is the determined cDNA sequence for clone KAM201 E10.

[1657] SEQ ID NO:1776 is the determined cDNA sequence for clone SAM113 C4.

[1658] SEQ ID NO:1777 is the determined cDNA sequence for clone KAM207 B8.

[1659] SEQ ID NO:1778 is the determined cDNA sequence for clone KAM207 C9.

[1660] SEQ ID NO:1779 is the determined cDNA sequence for clone KAM217 C3.

[1661] SEQ ID NO:1780 is the determined cDNA sequence for clone KAM204 A6.

[1662] SEQ ID NO:1781 is the determined cDNA sequence for clone SAM125 H7.

[1663] SEQ ID NO:1782 is the determined cDNA sequence for clone SAM129 G3.

[1664] SEQ ID NO:1783 is the determined cDNA sequence for clone LLAM27 F7.

[1665] SEQ ID NO:1784 is the determined cDNA sequence for clone LLAM26 F5.

[1666] SEQ ID NO:1785 is the determined cDNA sequence for clone KAM217 G11.

[1667] SEQ ID NO:1786 is the determined cDNA sequence for clone KAM217 G9.

[1668] SEQ ID NO:1787 is the determined cDNA sequence for clone SAM115 B3.

[1669] SEQ ID NO:1788 is the determined cDNA sequence for clone KAM211 B4.

[1670] SEQ ID NO:1789 is the determined cDNA sequence for clone KAM205 E9.

[1671] SEQ ID NO:1790 is the determined cDNA sequence for clone KAM210 B12.

[1672] SEQ ID NO:1791 is the determined cDNA sequence for clone KAM214 D1.

[1673] SEQ ID NO:1792 is the determined cDNA sequence for clone LLAM26 C2.

[1674] SEQ ID NO:1793 is the determined cDNA sequence for clone KAM209 B1.

[1675] SEQ ID NO:1794 is the determined cDNA sequence for clone KAM209 D9.

[1676] SEQ ID NO:1795 is the determined cDNA sequence for clone KAM213 D5.

[1677] SEQ ID NO:1796 is the determined cDNA sequence for clone KAM204 B7.

[1678] SEQ ID NO:1797 is the determined cDNA sequence for clone KAM203 A1.

[1679] SEQ ID NO:1798 is the determined cDNA sequence for clone KAM200 C7.

[1680] SEQ ID NO:1799 is the determined cDNA sequence for clone KAM216 G7.

[1681] SEQ ID NO: 1800 is the determined cDNA sequence for clone KAM212 H_{11.}

[1682] SEQ ID NO:1801 is the determined cDNA sequence for clone KAM216 G8.

[1683] SEQ ID NO:1802 is the determined cDNA sequence for clone KAM213 F9.

[1684] SEQ ID NO:1803 is the determined cDNA sequence for clone KAM200 C11.

[1685] SEQ ID NO:1804 is the determined cDNA sequence for clone KAM217 D10.

[1686] SEQ ID NO:1805 is the determined cDNA sequence for clone KAM213 D11.

[1687] SEQ ID NO:1806 is the determined cDNA sequence for clone LLAM25 G9.

[1688] SEQ ID NO:1807 is the determined cDNA sequence for clone KAM212 B8.

[1689] SEQ ID NO:1808 is the determined cDNA sequence for clone KAM204 G8.

[1690] SEQ ID NO:1809 is the determined cDNA sequence for clone KAM216 G9.

[1691] SEQ ID NO:1810 is the determined cDNA sequence for clone DAM202 C5.

[1692] SEQ ID NO:1811 is the determined cDNA sequence for clone SAM105 D10.

[1693] SEQ ID NO:1812 is the determined cDNA sequence for clone KAM217 D6.

[1694] SEQ ID NO:1813 is the determined cDNA sequence for clone KAM217 B10.

[1695] SEQ ID NO:1814 is the determined cDNA sequence for clone KAM217 H1.

[1696] SEQ ID NO:1815 is the determined cDNA sequence for clone KAM208 B2.

[1697] SEQ ID NO:1816 is the determined cDNA sequence for clone LLAM26 A2.

[1698] SEQ ID NO:1817 is the determined cDNA sequence for clone KAM208 F10.

[1699] SEQ ID NO:1818 is the determined cDNA sequence for clone KAM204 F7.

[1700] SEQ ID NO:1819 is the determined cDNA sequence for clone SAM122 G5.

[1701] SEQ ID NO:1820 is the determined cDNA sequence for clone KAM201 A9.

[1702] SEQ ID NO:1821 is the determined cDNA sequence for clone KAM205 C3.

[1703] SEQ ID NO:1822 is the determined cDNA sequence for clone SAM124 G9.

[1704] SEQ ID NO:1823 is the determined cDNA sequence for clone KAM216 D9.

[1705] SEQ ID NO:1824 is the determined cDNA sequence for clone KAM216 B12.

[1706] SEQ ID NO:1825 is the determined cDNA sequence for clone KAM218 D8.

[1707] SEQ ID NO:1826 is the determined cDNA sequence for clone KAM215 B11.

[1708] SEQ ID NO:1827 is the determined cDNA sequence for clone SAM 130 A1.

[1709] SEQ ID NO:1828 is the determined cDNA sequence for clone KAM205 F5.

[1710] SEQ ID NO:1829 is the determined cDNA sequence for clone KAM205 C4.

[1711] SEQ ID NO:1830 is the determined cDNA sequence for clone SAM115 G12.

[1712] SEQ ID NO:1831 is the determined cDNA sequence for clone KAM207 D6.

[1713] SEQ ID NO:1832 is the determined cDNA sequence for clone LLAM28 C3.

[1714] SEQ ID NO:1833 is the determined cDNA sequence for clone KAM205 D5.

[1715] SEQ ID NO:1834 is the determined cDNA sequence for clone KAM205 G7.

[1716] SEQ ID NO:1835 is the determined cDNA sequence for clone SAM120 H3.

[1717] SEQ ID NO:1836 is the determined cDNA sequence for clone KAM201 A1.

[1718] SEQ ID NO:1837 is the determined cDNA sequence for clone KAM211 H3.

[1719] SEQ ID NO:1838 is the determined cDNA sequence for clone KAM216 B8.

[1720] SEQ ID NO:1839 is the determined cDNA sequence for clone KAM216 D4.

[1721] SEQ ID NO:1840 is the determined cDNA sequence for clone KAM201 E4.

[1722] SEQ ID NO:1841 is the determined cDNA sequence for clone KAM214 C7.

[1723] SEQ ID NO:1842 is the determined cDNA sequence for clone KAM206 C4.

[1724] SEQ ID NO:1843 is the determined cDNA sequence for clone KAM215 C1.

[1725] SEQ ID NO:1844 is the determined cDNA sequence for clone K1100C.

[1726] SEQ ID NO:1845 is the determined cDNA sequence for clone K1101 C.

[1727] SEQ ID NO:1846 is the determined cDNA sequence for clone K1102C.

[1728] SEQ ID NO:1847 is an extended cDNA sequence for K1551 P.

[1729] SEQ ID NO:1848 is the predicted amino acid sequence for K1548P.

[1730] SEQ ID NO:1849 is the predicted amino acid sequence for K1549P.

[1731] SEQ ID NO:1850 is the predicted amino acid sequence for K1551 P.

[1732] SEQ ID NO:1851 is an extended amino acid sequence for K1551 P.

[1733] SEQ ID NO:1852 is the determined full-length cDNA sequence for K1622P.

[1734] SEQ ID NO:1853 is the determined cDNA sequence for ORF #1 (no upstream stop codon) of K1622P.

[1735] SEQ ID NO:1854 is the determined cDNA sequence for ORF #2 (first Methionine) of K1622P.

[1736] SEQ ID NO:1855 is the determined cDNA sequence for ORF #3 (second methionine with Kozac) of K1622P.

[1737] SEQ ID NO:1856 is the predicted amino acid sequence for K1622P ORF #1, encoded by the cDNA set forth in SEQ ID NO:1853.

[1738] SEQ ID NO:1857 is the predicted amino acid sequence for K1622P ORF #2, encoded by the cDNA set forth in SEQ ID NO:1854.

[1739] SEQ ID NO:1858 is the predicted amino acid sequence for K1622P ORF #3, encoded by the cDNA set forth in SEQ ID NO:1855.

[1740] SEQ ID NO:1859 is the cDNA coding sequence K1548P.

[1741] SEQ ID NO:1860 is the cDNA coding sequence K1549P.

[1742] SEQ ID NO:1861 is the cDNA coding sequence K1550P.

[1743] SEQ ID NO:1862 is the cDNA coding sequence K1551 P.

[1744] SEQ ID NO:1863 is the amino acid sequence for K1550P, encoded by the polynucleotide set forth in SEQ ID NO:1861.

### DETAILED DESCRIPTION OF THE INVENTION

[1745] U.S. patents, U.S. patent application publications, U.S. patent applications, foreign patents, foreign patent applications and non-patent publications referred to in this specification and/or listed in the Application Data Sheet, are incorporated herein by reference, in their entirety.

[1746] The present invention is directed generally to compositions and their use in the therapy and diagnosis of cancer, particularly kidney cancer. As described further below, illustrative compositions of the present invention include, but are not restricted to, polypeptides, particularly immunogenic polypeptides, polynucleotides encoding such polypeptides, antibodies and other binding agents, antigen presenting cells (APCs) and immune system cells (e.g., T cells).

[1747] The practice of the present invention will employ, unless indicated specifically to the contrary, conventional methods of virology, immunology, microbiology, molecular biology and recombinant DNA techniques within the skill of the art, many of which are described below for the purpose of illustration. Such techniques are explained fully in the literature. See, e.g., Sambrook, et al. Molecular Cloning: A Laboratory Manual (2nd Edition, 1989); Maniatis et al. Molecular Cloning: A Laboratory Manual (1982); DNA Cloning: A Practical Approach, vol. I & II (D. Glover, ed.); Oligonucleotide Synthesis (N. Gait, ed., 1984); Nucleic Acid Hybridization (B. Hames & S. Higgins, eds., 1985); Transcription and Translation (B. Hames & S. Higgins, eds., 1984); Animal Cell Culture (R. Freshney, ed., 1986); Perbal, A Practical Guide to Molecular Cloning (1984).

[1748] All publications, patents and patent applications cited herein, whether supra or infra, are hereby incorporated by reference in their entirety.

[1749] As used in this specification and the appended claims, the singular forms “a,” “an” and “the” include plural references unless the content clearly dictates otherwise.

[1750] Polypeptide Compositions

[1751] As used herein, the term “polypeptide” “is used in its conventional meaning, ie., as a sequence of amino acids. The polypeptides are not limited to a specific length of the product; thus, peptides, oligopeptides, and proteins are included within the definition of polypeptide, and such terms may be used interchangeably herein unless specifically indicated otherwise. This term also does not refer to or exclude post-expression modifications of the polypeptide, for example, glycosylations, acetylations, phosphorylations and the like, as well as other modifications known in the art, both naturally occurring and non-naturally occurring. A polypeptide may be an entire protein, or a subsequence thereof. Particular polypeptides of interest in the context of this invention are amino acid subsequences comprising epitopes, i.e., antigenic determinants substantially responsible for the immunogenic properties of a polypeptide and being capable of evoking an immune response.

[1752] Particularly illustrative polypeptides of the present invention comprise those encoded by a polynucleotide sequence set forth in any one of SEQ ID NOs:1-1847, 1852-1855, and 1859-1862, or a sequence that hybridizes under moderately stringent conditions, or, alternatively, under highly stringent conditions, to a polynucleotide sequence set forth in any one of SEQ ID NOs:1-1847, 1852-1855, and 1859-1862. Certain other illustrative polypeptides of the invention comprise amino acid sequences as set forth in any one of SEQ ID NOs:1848-1851, 1856-1858, and 1863.

[1753] The polypeptides of the present invention are sometimes herein referred to as kidney tumor proteins or kidney tumor polypeptides, as an indication that their identification has been based at least in part upon their increased levels of expression in kidney tumor samples. Thus, a “kidney tumor polypeptide” or “kidney tumor protein,” refers generally to a polypeptide sequence of the present invention, or a polynucleotide sequence encoding such a polypeptide, that is expressed in a substantial proportion of kidney tumor samples, for example preferably greater than about 20%, more preferably greater than about 30%, and most preferably greater than about 50% or more of kidney tumor samples tested, at a level that is at least two fold, and preferably at least five fold, greater than the level of expression in normal tissues, as determined using a representative assay provided herein. A kidney tumor polypeptide sequence of the invention, based upon its increased level of expression in tumor cells, has particular utility both as a diagnostic marker as well as a therapeutic target, as further described below.

[1754] In certain preferred embodiments, the polypeptides of the invention are immunogenic, i.e., they react detectably within an immunoassay (such as an ELISA or T-cell stimulation assay) with antisera and/or T-cells from a patient with kidney cancer. Screening for immunogenic activity can be performed using techniques well known to the skilled artisan. For example, such screens can be performed using methods such as those described in Harlow and Lane, Antibodies: A Laboratory Manual, Cold Spring Harbor Laboratory, 1988. In one illustrative example, a polypeptide may be immobilized on a solid support and contacted with patient sera to allow binding of antibodies within the sera to the immobilized polypeptide. Unbound sera may then be removed and bound antibodies detected using, for example, ¹²⁵I-labeled Protein A.

[1755] As would be recognized by the skilled artisan, immunogenic portions of the polypeptides disclosed herein are also encompassed by the present invention. An “immunogenic portion,” as used herein, is a fragment of an immunogenic polypeptide of the invention that itself is immunologically reactive (i.e., specifically binds) with the B-cells and/or T-cell surface antigen receptors that recognize the polypeptide. Immunogenic portions may generally be identified using well known techniques, such as those summarized in Paul, Fundamental Immunology, 3rd ed., 243-247 (Raven Press, 1993) and references cited therein. Such techniques include screening polypeptides for the ability to react with antigen-specific antibodies, antisera and/or T-cell lines or clones. As used herein, antisera and antibodies are “antigen-specific” if they specifically bind to an antigen (i.e., they react with the protein in an ELISA or other immunoassay, and do not react detectably with unrelated proteins). Such antisera and antibodies may be prepared as described herein, and using well-known techniques.

[1756] In one preferred embodiment, an immunogenic portion of a polypeptide of the present invention is a portion that reacts with antisera and/or T-cells at a level that is not substantially less than the reactivity of the full-length polypeptide (e.g., in an ELISA and/or T-cell reactivity assay). Preferably, the level of immunogenic activity of the immunogenic portion is at least about 50%, preferably at least about 70% and most preferably greater than about 90% of the immunogenicity for the full-length polypeptide. In some instances, preferred immunogenic portions will be identified that have a level of immunogenic activity greater than that of the corresponding full-length polypeptide, e.g., having greater than about 100% or 150% or more immunogenic activity.

[1757] In certain other embodiments, illustrative immunogenic portions may include peptides in which an N-terminal leader sequence and/or transmembrane domain have been deleted. Other illustrative immunogenic portions will contain a small N- and/or C-terminal deletion (e.g., 1-30 amino acids, preferably 5-15 amino acids), relative to the mature protein.

[1758] In another embodiment, a polypeptide composition of the invention may also comprise one or more polypeptides that are immunologically reactive with T cells and/or antibodies generated against a polypeptide of the invention, particularly a polypeptide having an amino acid sequence disclosed herein, or to an immunogenic fragment or variant thereof.

[1759] In another embodiment of the invention, polypeptides are provided that comprise one or more polypeptides that are capable of eliciting T cells and/or antibodies that are immunologically reactive with one or more polypeptides described herein, or one or more polypeptides encoded by contiguous nucleic acid sequences contained in the polynucleotide sequences disclosed herein, or immunogenic fragments or variants thereof, or to one or more nucleic acid sequences which hybridize to one or more of these sequences under conditions of moderate to high stringency.

[1760] The present invention, in another aspect, provides polypeptide fragments comprising at least about 5,10, 15, 20, 25, 50, or 100 contiguous amino acids, or more, including all intermediate lengths, of a polypeptide compositions set forth herein, such as those set forth in SEQ ID NOs: 1848-1851, 1856-1858, and 1863, or those encoded by a polynucleotide sequence set forth in a sequence of SEQ ID NOs:1-1847, 1852-1855, and 1859-1862.

[1761] In another aspect, the present invention provides variants of the polypeptide compositions described herein. Polypeptide variants generally encompassed by the present invention will typically exhibit at least about 70%, 75%, 80%, 85%, 90%, 91%, 92%, 93%, 94%, 95%, 96%, 97%, 98%, or 99% or more identity (determined as described below), along its length, to a polypeptide sequences set forth herein.

[1762] In one preferred embodiment, the polypeptide fragments and variants provided by the present invention are immunologically reactive with an antibody and/or T-cell that reacts with a full-length polypeptide specifically set forth herein.

[1763] In another preferred embodiment, the polypeptide fragments and variants provided by the present invention exhibit a level of immunogenic activity of at least about 50%, preferably at least about 70%, and most preferably at least about 90% or more of that exhibited by a full-length polypeptide sequence specifically set forth herein.

[1764] A polypeptide “variant,” as the term is used herein, is a polypeptide that typically differs from a polypeptide specifically disclosed herein in one or more substitutions, deletions, additions and/or insertions. Such variants may be naturally occurring or may be synthetically generated, for example, by modifying one or more of the above polypeptide sequences of the invention and evaluating their immunogenic activity as described herein and/or using any of a number of techniques well known in the art.

[1765] For example, certain illustrative variants of the polypeptides of the invention include those in which one or more portions, such as an N-terminal leader sequence or transmembrane domain, have been removed. Other illustrative variants include variants in which a small portion (e.g., 1-30 amino acids, preferably 5-15 amino acids) has been removed from the N— and/or C-terminal of the mature protein.

[1766] In many instances, a variant will contain conservative substitutions. A “conservative substitution” is one in which an amino acid is substituted for another amino acid that has similar properties, such that one skilled in the art of peptide chemistry would expect the secondary structure and hydropathic nature of the polypeptide to be substantially unchanged. As described above, modifications may be made in the structure of the polynucleotides and polypeptides of the present invention and still obtain a functional molecule that encodes a variant or derivative polypeptide with desirable characteristics, e.g., with immunogenic characteristics. When it is desired to alter the amino acid sequence of a polypeptide to create an equivalent, or even an improved, immunogenic variant or portion of a polypeptide of the invention, one skilled in the art will typically change one or more of the codons of the encoding DNA sequence according to Table 1.

[1767] For example, certain amino acids may be substituted for other amino acids in a protein structure without appreciable loss of interactive binding capacity with structures such as, for example, antigen-binding regions of antibodies or binding sites on substrate molecules. Since it is the interactive capacity and nature of a protein that defines that protein's biological functional activity, certain amino acid sequence substitutions can be made in a protein sequence, and, of course, its underlying DNA coding sequence, and nevertheless obtain a protein with like properties. It is thus contemplated that various changes may be made in the peptide sequences of the disclosed compositions, or corresponding DNA sequences which encode said peptides without appreciable loss of their biological utility or activity.

TABLE 1

| | |
|---|---|
| Amino Acids | Codons |

| | | | |
|---|---|---|---|
| Alanine | Ala | A | GGA GCC GCG GCU |
| Cysteine | Cys | C | UGC UGU |
| Aspartic acid | Asp | D | GAC GAU |
| Glutamic acid | Glu | E | GAA GAG |
| Phenylalanine | Phe | F | UUC UUU |
| Glycine | Gly | G | GGA GGC GGG GGU |
| Histidine | His | H | CAC CAU |
| Isoleucine | Ile | I | AUA AUC AUU |
| Lysine | Lys | K | AAA AAG |
| Leucine | Leu | L | UUA UUG CUA CUC CUG CUU |
| Methionine | Met | M | AUG |
| Asparagine | Asn | N | AAC AAU |
| Proline | Pro | P | CCA CCC CCG CCU |
| Glutamine | Gln | Q | CAA CAG |
| Arginine | Arg | R | AGA AGG CGA CGC CGG CGU |
| Serine | Ser | S | AGC AGU UCA UCC UCG UCU |
| Threonine | Thr | T | ACA ACC ACG ACU |
| Valine | Val | V | GUA GUC GUG GUU |
| Tryptophan | Trp | W | UGG |
| Tyrosine | Tyr | Y | UAC UAU |

[1768] In making such changes, the hydropathic index of amino acids may be considered. The importance of the hydropathic amino acid index in conferring interactive biologic function on a protein is generally understood in the art (Kyte and Doolittle, 1982, incorporated herein by reference). It is accepted that the relative hydropathic character of the amino acid contributes to the secondary structure of the resultant protein, which in turn defines the interaction of the protein with other molecules, for example, enzymes, substrates, receptors, DNA, antibodies, antigens, and the like. Each amino acid has been assigned a hydropathic index on the basis of its hydrophobicity and charge characteristics (Kyte and Doolittle, 1982). These values are: isoleucine (+4.5); valine (+4.2); leucine (+3.8); phenylalanine (+2.8); cysteine/cystine (+2.5); methionine (+1.9); alanine (+1.8); glycine (−0.4); threonine (−0.7); serine (−0.8); tryptophan (−0.9); tyrosine (−1.3); proline (−1.6); histidine (−3.2); glutamate (−3.5); glutamine (−3.5); aspartate (−3.5); asparagine (−3.5); lysine (−3.9); and arginine (−4.5).

[1769] It is known in the art that certain amino acids may be substituted by other amino acids having a similar hydropathic index or score and still result in a protein with similar biological activity, i.e. still obtain a biological functionally equivalent protein. In making such changes, the substitution of amino acids whose hydropathic indices are within +2 is preferred, those within +1 are particularly preferred, and those within +0.5 are even more particularly preferred. It is also understood in the art that the substitution of like amino acids can be made effectively on the basis of hydrophilicity. U.S. Pat. No. 4,554,101 (specifically incorporated herein by reference in its entirety), states that the greatest local average hydrophilicity of a protein, as governed by the hydrophilicity of its adjacent amino acids, correlates with a biological property of the protein.

[1770] As detailed in U.S. Pat. No. 4,554,101, the following hydrophilicity values have been assigned to amino acid residues: arginine (+3.0); lysine (+3.0); aspartate (+3.0±1); glutamate (+3.0±1); serine (+0.3); asparagine (+0.2); glutamine (+0.2); glycine (O); threonine (−0.4); proline (−0.5±1); alanine (−0.5); histidine (−0.5); cysteine (−1.0); methionine (−1.3); valine (−1.5); leucine (−1.8); isoleucine (−1.8); tyrosine (−2.3); phenylalanine (−2.5); tryptophan (−3.4). It is understood that an amino acid can be substituted for another having a similar hydrophilicity value and still obtain a biologically equivalent, and in particular, an immunologically equivalent protein. In such changes, the substitution of amino acids whose hydrophilicity values are within ±2 is preferred, those within ±1 are particularly preferred, and those within ±0.5 are even more particularly preferred.

[1771] As outlined above, amino acid substitutions are generally therefore based on the relative similarity of the amino acid side-chain substituents, for example, their hydrophobicity, hydrophilicity, charge, size, and the like. Exemplary substitutions that take various of the foregoing characteristics into consideration are well known to those of skill in the art and include: arginine and lysine; glutamate and aspartate; serine and threonine; glutamine and asparagine; and valine, leucine and isoleucine.

[1772] In addition, any polynucleotide may be further modified to increase stability in vivo. Possible modifications include, but are not limited to, the addition of flanking sequences at the 5′ and/or 3′ ends; the use of phosphorothioate or 2′ O-methyl rather than phosphodiesterase linkages in the backbone; and/or the inclusion of nontraditional bases such as inosine, queosine and wybutosine, as well as acetyl- methyl-, thio- and other modified forms of adenine, cytidine, guanine, thymine and uridine.

[1773] Amino acid substitutions may further be made on the basis of similarity in polarity, charge, solubility, hydrophobicity, hydrophilicity and/or the amphipathic nature of the residues. For example, negatively charged amino acids include aspartic acid and glutamic acid; positively charged amino acids include lysine and arginine; and amino acids with uncharged polar head groups having similar hydrophilicity values include leucine, isoleucine and valine; glycine and alanine; asparagine and glutamine; and serine, threonine, phenylalanine and tyrosine. Other groups of amino acids that may represent conservative changes include: (1) ala, pro, gly, glu, asp, gin, asn, ser, thr; (2) cys, ser, tyr, thr; (3) val, ile, leu, met, ala, phe; (4) lys, arg, his; and (5) phe, tyr, trp, his. A variant may also, or alternatively, contain nonconservative changes. In a preferred embodiment, variant polypeptides differ from a native sequence by substitution, deletion or addition of five amino acids or fewer. Variants may also (or alternatively) be modified by, for example, the deletion or addition of amino acids that have minimal influence on the immunogenicity, secondary structure and hydropathic nature of the polypeptide.

[1774] As noted above, polypeptides may comprise a signal (or leader) sequence at the N-terminal end of the protein, which co-translationally or post-translationally directs transfer of the protein. The polypeptide may also be conjugated to a linker or other sequence for ease of synthesis, purification or identification of the polypeptide (e.g., poly-His), or to enhance binding of the polypeptide to a solid support. For example, a polypeptide may be conjugated to an immunoglobulin Fc region.

[1775] When comparing polypeptide sequences, two sequences are said to be “identical” if the sequence of amino acids in the two sequences is the same when aligned for maximum correspondence, as described below. Comparisons between two sequences are typically performed by comparing the sequences over a comparison window to identify and compare local regions of sequence similarity. A “comparison window” as used herein, refers to a segment of at least about 20 contiguous positions, usually 30 to about 75, 40 to about 50, in which a sequence may be compared to a reference sequence of the same number of contiguous positions after the two sequences are optimally aligned.

[1776] Optimal alignment of sequences for comparison may be conducted using the Megalign program in the Lasergene suite of bioinformatics software (DNASTAR, Inc., Madison, Wis.), using default parameters. This program embodies several alignment schemes described in the following references: Dayhoff, M. O. (1978) A model of evolutionary change in proteins—Matrices for detecting distant relationships. In Dayhoff, M. O. (ed.) Atlas of Protein Sequence and Structure, National Biomedical Research Foundation, Washington D.C. Vol. 5, Suppl. 3, pp. 345-358; Hein J. (1990) Unified Approach to Alignment and Phylogenes pp. 626-645 Methods in Enzymology vol. 183, Academic Press, Inc., San Diego, Calif.; Higgins, D. G. and Sharp, P. M. (1989) CABIOS 5:151-153; Myers, E. W. and Muller W. (1988) CABIOS 4:11-17; Robinson, E. D. (1971) Comb. Theor 11:105; Saitou, N. Nei, M. (1987) Mol. Biol. Evol. 4:406-425; Sneath, P. H. A. and Sokal, R. R. (1973) Numerical Taxonomy—the Principles and Practice of Numerical Taxonomy, Freeman Press, San Francisco, Calif.; Wilbur, W. J. and Lipman, D. J. (1983) Proc. Natl. Acad., Sci. USA 80:726-730.

[1777] Alternatively, optimal alignment of sequences for comparison may be conducted by the local identity algorithm of Smith and Waterman (1981) Add. APL. Math 2:482, by the identity alignment algorithm of Needleman and Wunsch (1970) J. Mol. Biol. 48:443, by the search for similarity methods of Pearson and Lipman (1988) Proc. Natl. Acad. Sci. USA 85: 2444, by computerized implementations of these algorithms (GAP, BESTFIT, BLAST, FASTA, and TFASTA in the Wisconsin Genetics Software Package, Genetics Computer Group (GCG), 575 Science Dr., Madison, Wis.), or by inspection.

[1778] One preferred example of algorithms that are suitable for determining percent sequence identity and sequence similarity are the BLAST and BLAST 2.0 algorithms, which are described in Altschul et al. (1977) Nucl. Acids Res. 25:3389-3402 and Altschul et al. (1990) J. Mol. Biol. 215:403-410, respectively. BLAST and BLAST 2.0 can be used, for example with the parameters described herein, to determine percent sequence identity for the polynucleotides and polypeptides of the invention. Software for performing BLAST analyses is publicly available through the National Center for Biotechnology Information. For amino acid sequences, a scoring matrix can be used to calculate the cumulative score. Extension of the word hits in each direction are halted when: the cumulative alignment score falls off by the quantity X from its maximum achieved value; the cumulative score goes to zero or below, due to the accumulation of one or more negative-scoring residue alignments; or the end of either sequence is reached. The BLAST algorithm parameters W, T and X determine the sensitivity and speed of the alignment.

[1779] In one preferred approach, the “percentage of sequence identity” is determined by comparing two optimally aligned sequences over a window of comparison of at least 20 positions, wherein the portion of the polypeptide sequence in the comparison window may comprise additions or deletions (i.e., gaps) of 20 percent or less, usually 5 to 15 percent, or 10 to 12 percent, as compared to the reference sequences (which does not comprise additions or deletions) for optimal alignment of the two sequences. The percentage is calculated by determining the number of positions at which the identical amino acid residue occurs in both sequences to yield the number of matched positions, dividing the number of matched positions by the total number of positions in the reference sequence (i.e., the window size) and multiplying the results by 100 to yield the percentage of sequence identity.

[1780] Within other illustrative embodiments, a polypeptide may be a xenogeneic polypeptide that comprises an polypeptide having substantial sequence identity, as described above, to the human polypeptide (also termed autologous antigen) which served as a reference polypeptide, but which xenogeneic polypeptide is derived from a different, non-human species. One skilled in the art will recognize that “self” antigens are often poor stimulators of CD8+ and CD4+ T-lymphocyte responses, and therefore efficient immunotherapeutic strategies directed against tumor polypeptides require the development of methods to overcome immune tolerance to particular self tumor polypeptides. For example, humans immunized with prostase protein from a xenogeneic (non human) origin are capable of mounting an immune response against the counterpart human protein, e.g. the human prostase tumor protein present on human tumor cells. Accordingly, the present invention provides methods for purifying the xenogeneic form of the tumor proteins set forth herein, such as the polypeptides set forth in SEQ ID NOs: 1848-1851, 1856-1858, and 1863 or the polypeptides encoded by polynucleotide sequences set forth in SEQ ID NOs:1-1847, 1852-1855, and 1859-1862.

[1781] Therefore, one aspect of the present invention provides xenogeneic variants of the polypeptide compositions described herein. Such xenogeneic variants generally encompassed by the present invention will typically exhibit at least about 70%, 75%, 80%, 85%, 90%, 91%, 92%, 93%, 94%, 95%, 96%, 97%, 98%, or 99% or more identity along their lengths, to a polypeptide sequences set forth herein.

[1782] More particularly, the invention is directed to mouse, rat, monkey, porcine and other non-human polypeptides which can be used as xenogeneic forms of human polypeptides set forth herein, to induce immune responses directed against tumor polypeptides of the invention.

[1783] Within other illustrative embodiments, a polypeptide may be a fusion polypeptide that comprises multiple polypeptides as described herein, or that comprises at least one polypeptide as described herein and an unrelated sequence, such as a known tumor protein. A fusion partner may, for example, assist in providing T helper epitopes (an immunological fusion partner), preferably T helper epitopes recognized by humans, or may assist in expressing the protein (an expression enhancer) at higher yields than the native recombinant protein. Certain preferred fusion partners are both immunological and expression enhancing fusion partners. Other fusion partners may be selected so as to increase the solubility of the polypeptide or to enable the polypeptide to be targeted to desired intracellular compartments. Still further fusion partners include affinity tags, which facilitate purification of the polypeptide.

[1784] Fusion polypeptides may generally be prepared using standard techniques, including chemical conjugation. Preferably, a fusion polypeptide is expressed as a recombinant polypeptide, allowing the production of increased levels, relative to a non-fused polypeptide, in an expression system. Briefly, DNA sequences encoding the polypeptide components may be assembled separately, and ligated into an appropriate expression vector. The 3′ end of the DNA sequence encoding one polypeptide component is ligated, with or without a peptide linker, to the 5′ end of a DNA sequence encoding the second polypeptide component so that the reading frames of the sequences are in phase. This permits translation into a single fusion polypeptide that retains the biological activity of both component polypeptides.

[1785] A peptide linker sequence may be employed to separate the first and second polypeptide components by a distance sufficient to ensure that each polypeptide folds into its secondary and tertiary structures. Such a peptide linker sequence is incorporated into the fusion polypeptide using standard techniques well known in the art. Suitable peptide linker sequences may be chosen based on the following factors: (1) their ability to adopt a flexible extended conformation; (2) their inability to adopt a secondary structure that could interact with functional epitopes on the first and second polypeptides; and (3) the lack of hydrophobic or charged residues that might react with the polypeptide functional epitopes. Preferred peptide linker sequences contain Gly, Asn and Ser residues. Other near neutral amino acids, such as Thr and Ala may also be used in the linker sequence. Amino acid sequences which may be usefully employed as linkers include those disclosed in Maratea et al., Gene 40:39-46,1985; Murphy et al., Proc. Natl. Acad. Sci. USA 83:8258-8262, 1986; U.S. Pat. No. 4,935,233 and U.S. Pat. No. 4,751,180. The linker sequence may generally be from 1 to about 50 amino acids in length. Linker sequences are not required when the first and second polypeptides have non-essential N-terminal amino acid regions that can be used to separate the functional domains and prevent steric interference.

[1786] The ligated DNA sequences are operably linked to suitable transcriptional or translational regulatory elements. The regulatory elements responsible for expression of DNA are located only 5′ to the DNA sequence encoding the first polypeptides. Similarly, stop codons required to end translation and transcription termination signals are only present 3′ to the DNA sequence encoding the second polypeptide.

[1787] The fusion polypeptide can comprise a polypeptide as described herein together with an unrelated immunogenic protein, such as an immunogenic protein capable of eliciting a recall response. Examples of such proteins include tetanus, tuberculosis and hepatitis proteins (see, for example, Stoute et al. New Engl. J. Med., 336:86-91,1997).

[1788] In one preferred embodiment, the immunological fusion partner is derived from a Mycobacterium sp., such as a Mycobacterium tuberculosis-derived Ra12 fragment. Ra12 compositions and methods for their use in enhancing the expression and/or immunogenicity of heterologous polynucleotide/polypeptide sequences is described in U.S. Patent Application No. 60/158,585, the disclosure of which is incorporated herein by reference in its entirety. Briefly, Ra12 refers to a polynucleotide region that is a subsequence of a Mycobacterium tuberculosis MTB32A nucleic acid. MTB32A is a serine protease of 32 KD molecular weight encoded by a gene in virulent and avirulent strains of M. tuberculosis. The nucleotide sequence and amino acid sequence of MTB32A have been described (for example, U.S. Patent Application No. 60/158,585; see also, Skeiky et al., Infection and Immun. (1999) 67:3998-4007, incorporated herein by reference). C-terminal fragments of the MTB32A coding sequence express at high levels and remain as a soluble polypeptides throughout the purification process. Moreover, Ra12 may enhance the immunogenicity of heterologous immunogenic polypeptides with which it is fused. One preferred Ra12 fusion polypeptide comprises a 14 KD C-terminal fragment corresponding to amino acid residues 192 to 323 of MTB32A. Other preferred Ra12 polynucleotides generally comprise at least about 15 consecutive nucleotides, at least about 30 nucleotides, at least about 60 nucleotides, at least about 100 nucleotides, at least about 200 nucleotides, or at least about 300 nucleotides that encode a portion of a Ra12 polypeptide. Ra12 polynucleotides may comprise a native sequence (i.e., an endogenous sequence that encodes a Ra12 polypeptide or a portion thereof) or may comprise a variant of such a sequence. Ra12 polynucleotide variants may contain one or more substitutions, additions, deletions and/or insertions such that the biological activity of the encoded fusion polypeptide is not substantially diminished, relative to a fusion polypeptide comprising a native Ra12 polypeptide. Variants preferably exhibit at least about 70% identity, more preferably at least about 80% identity and most preferably at least about 90% identity to a polynucleotide sequence that encodes a native Ra12 polypeptide or a portion thereof.

[1789] Within other preferred embodiments, an immunological fusion partner is derived from protein D, a surface protein of the gram-negative bacterium Haemophilus influenza B (WO 91/18926). Preferably, a protein D derivative comprises approximately the first third of the protein (e.g., the first N-terminal 100-110 amino acids), and a protein D derivative may be lipidated. Within certain preferred embodiments, the first 109 residues of a Lipoprotein D fusion partner is included on the N-terminus to provide the polypeptide with additional exogenous T-cell epitopes and to increase the expression level in E. coli (thus functioning as an expression enhancer). The lipid tail ensures optimal presentation of the antigen to antigen presenting cells. Other fusion partners include the non-structural protein from influenzae virus, NS1 (hemaglutinin). Typically, the N-terminal 81 amino acids are used, although different fragments that include T-helper epitopes may be used.

[1790] In another embodiment, the immunological fusion partner is the protein known as LYTA, or a portion thereof (preferably a C-terminal portion). LYTA is derived from Streptococcus pneumoniae, which synthesizes an N-acetyl-L-alanine amidase known as amidase LYTA (encoded by the LytA gene; Gene 43:265-292, 1986). LYTA is an autolysin that specifically degrades certain bonds in the peptidoglycan backbone. The C-terminal domain of the LYTA protein is responsible for the affinity to the choline or to some choline analogues such as DEAE. This property has been exploited for the development of E. coli C-LYTA expressing plasmids useful for expression of fusion proteins. Purification of hybrid proteins containing the C-LYTA fragment at the amino terminus has been described (see Biotechnology 10:795-798,1992). Within a preferred embodiment, a repeat portion of LYTA may be incorporated into a fusion polypeptide. A repeat portion is found in the C-terminal region starting at residue 178. A particularly preferred repeat portion incorporates residues 188-305.

[1791] Yet another illustrative embodiment involves fusion polypeptides, and the polynucleotides encoding them, wherein the fusion partner comprises a targeting signal capable of directing a polypeptide to the endosomal/lysosomal compartment, as described in U.S. Pat. No. 5,633,234. An immunogenic polypeptide of the invention, when fused with this targeting signal, will associate more efficiently with MHC class II molecules and thereby provide enhanced in vivo stimulation of CD4⁺ T-cells specific for the polypeptide.

[1792] Polypeptides of the invention are prepared using any of a variety of well known synthetic and/or recombinant techniques, the latter of which are further described below. Polypeptides, portions and other variants generally less than about 150 amino acids can be generated by synthetic means, using techniques well known to those of ordinary skill in the art. In one illustrative example, such polypeptides are synthesized using any of the commercially available solid-phase techniques, such as the Merrifield solid-phase synthesis method, where amino acids are sequentially added to a growing amino acid chain. See Merrifield, J. Am. Chem. Soc. 85:2149-2146,1963. Equipment for automated synthesis of polypeptides is commercially available from suppliers such as Perkin Elmer/Applied BioSystems Division (Foster City, Calif.), and may be operated according to the manufacturer's instructions.

[1793] In general, polypeptide compositions (including fusion polypeptides) of the invention are isolated. An “isolated” polypeptide is one that is removed from its original environment. For example, a naturally-occurring protein or polypeptide is isolated if it is separated from some or all of the coexisting materials in the natural system. Preferably, such polypeptides are also purified, e.g., are at least about 90% pure, more preferably at least about 95% pure and most preferably at least about 99% pure.

[1794] Polynucleotide Compositions

[1795] The present invention, in other aspects, provides polynucleotide compositions. The terms “DNA” and “polynucleotide” are used essentially interchangeably herein to refer to a DNA molecule that has been isolated free of total genomic DNA of a particular species. “Isolated,” as used herein, means that a polynucleotide is substantially away from other coding sequences, and that the DNA molecule does not contain large portions of unrelated coding DNA, such as large chromosomal fragments or other functional genes or polypeptide coding regions. Of course, this refers to the DNA molecule as originally isolated, and does not exclude genes or coding regions later added to the segment by the hand of man.

[1796] As will be understood by those skilled in the art, the polynucleotide compositions of this invention can include genomic sequences, extra-genomic and plasmid-encoded sequences and smaller engineered gene segments that express, or may be adapted to express, proteins, polypeptides, peptides and the like. Such segments may be naturally isolated, or modified synthetically by the hand of man.

[1797] As will be also recognized by the skilled artisan, polynucleotides of the invention may be single-stranded (coding or antisense) or double-stranded, and may be DNA (genomic, cDNA or synthetic) or RNA molecules. RNA molecules may include HnRNA molecules, which contain introns and correspond to a DNA molecule in a one-to-one manner, and mRNA molecules, which do not contain introns. Additional coding or non-coding sequences may, but need not, be present within a polynucleotide of the present invention, and a polynucleotide may, but need not, be linked to other molecules and/or support materials.

[1798] Polynucleotides may comprise a native sequence (i.e., an endogenous sequence that encodes a polypeptide/protein of the invention or a portion thereof) or may comprise a sequence that encodes a variant or derivative, preferably and immunogenic variant or derivative, of such a sequence.

[1799] Therefore, according to another aspect of the present invention, polynucleotide compositions are provided that comprise some or all of a polynucleotide sequence set forth in any one of SEQ ID NOs:1-1847, 1852-1855, and 1859-1862, complements of a polynucleotide sequence set forth in any one of SEQ ID NOs:1-1847, 1852-1855, and 1859-1862, and degenerate variants of a polynucleotide sequence set forth in any one of SEQ ID NOs:1-1847, 1852-1855, and 1859-1862. In certain preferred embodiments, the polynucleotide sequences set forth herein encode immunogenic polypeptides, as described above.

[1800] In other related embodiments, the present invention provides polynucleotide variants having substantial identity to the sequences disclosed herein in SEQ ID NOs:1-1847, 1852-1855, and 1859-1862, for example those comprising at least 70% sequence identity, preferably at least 75%, 80%, 85%, 90%, 95%, 96%, 97%, 98%, or 99% or higher, sequence identity compared to a polynucleotide sequence of this invention using the methods described herein, (e.g., BLAST analysis using standard parameters, as described below). One skilled in this art will recognize that these values can be appropriately adjusted to determine corresponding identity of proteins encoded by two nucleotide sequences by taking into account codon degeneracy, amino acid similarity, reading frame positioning and the like.

[1801] Typically, polynucleotide variants will contain one or more substitutions, additions, deletions and/or insertions, preferably such that the immunogenicity of the polypeptide encoded by the variant polynucleotide is not substantially diminished relative to a polypeptide encoded by a polynucleotide sequence specifically set forth herein). The term “variants” should also be understood to encompasses homologous genes of xenogenic origin.

[1802] In additional embodiments, the present invention provides polynucleotide fragments comprising or consisting of various lengths of contiguous stretches of sequence identical to or complementary to one or more of the sequences disclosed herein. For example, polynucleotides are provided by this invention that comprise or consist of at least about 10, 15, 20, 30, 40, 50, 75, 100, 150, 200, 300, 400, 500 or 1000 or more contiguous nucleotides of one or more of the sequences disclosed herein as well as all intermediate lengths there between. It will be readily understood that “intermediate lengths”, in this context, means any length between the quoted values, such as 16,17,18,19, etc.; 21,22, 23, etc.; 30,31, 32, etc.; 50, 51, 52, 53, etc.; 100, 101, 102, 103, etc.; 150, 151, 152, 153, etc.; including all integers through 200-500; 500-1,000, and the like. A polynucleotide sequence as described here may be extended at one or both ends by additional nucleotides not found in the native sequence. This additional sequence may consist of 1, 2, 3, 4, 5, 6, 7, 8, 9, 10, 11, 12, 13, 14, 15, 16, 17, 18, 19, or 20 nucleotides at either end of the disclosed sequence or at both ends of the disclosed sequence.

[1803] In another embodiment of the invention, polynucleotide compositions are provided that are capable of hybridizing under moderate to high stringency conditions to a polynucleotide sequence provided herein, or a fragment thereof, or a complementary sequence thereof. Hybridization techniques are well known in the art of molecular biology. For purposes of illustration, suitable moderately stringent conditions for testing the hybridization of a polynucleotide of this invention with other polynucleotides include prewashing in a solution of 5× SSC, 0.5% SDS, 1.0 mM EDTA (pH 8.0); hybridizing at 50° C.-60° C., 5× SSC, overnight; followed by washing twice at 65° C. for 20 minutes with each of 2×, 0.5× and 0.2× SSC containing 0.1% SDS. One skilled in the art will understand that the stringency of hybridization can be readily manipulated, such as by altering the salt content of the hybridization solution and/or the temperature at which the hybridization is performed. For example, in another embodiment, suitable highly stringent hybridization conditions include those described above, with the exception that the temperature of hybridization is increased, e.g., to 60-65° C. or 65-70° C.

[1804] In certain preferred embodiments, the polynucleotides described above, e.g., polynucleotide variants, fragments and hybridizing sequences, encode polypeptides that are immunologically cross-reactive with a polypeptide sequence specifically set forth herein. In other preferred embodiments, such polynucleotides encode polypeptides that have a level of immunogenic activity of at least about 50%, preferably at least about 70%, and more preferably at least about 90% of that for a polypeptide sequence specifically set forth herein.

[1805] The polynucleotides of the present invention, or fragments thereof, regardless of the length of the coding sequence itself, may be combined with other DNA sequences, such as promoters, polyadenylation signals, additional restriction enzyme sites, multiple cloning sites, other coding segments, and the like, such that their overall length may vary considerably. It is therefore contemplated that a nucleic acid fragment of almost any length may be employed, with the total length preferably being limited by the ease of preparation and use in the intended recombinant DNA protocol. For example, illustrative polynucleotide segments with total lengths of about 10,000, about 5000, about 3000, about 2,000, about 1,000, about 500, about 200, about 100, about 50 base pairs in length, and the like, (including all intermediate lengths) are contemplated to be useful in many implementations of this invention.

[1806] When comparing polynucleotide sequences, two sequences are said to be “identical” if the sequence of nucleotides in the two sequences is the same when aligned for maximum correspondence, as described below. Comparisons between two sequences are typically performed by comparing the sequences over a comparison window to identify and compare local regions of sequence similarity. A “comparison window” as used herein, refers to a segment of at least about 20 contiguous positions, usually 30 to about 75, 40 to about 50, in which a sequence may be compared to a reference sequence of the same number of contiguous positions after the two sequences are optimally aligned.

[1807] Optimal alignment of sequences for comparison may be conducted using the Megalign program in the Lasergene suite of bioinformatics software (DNASTAR, Inc., Madison, Wis.), using default parameters. This program embodies several alignment schemes described in the following references: Dayhoff, M. O. (1978) A model of evolutionary change in proteins—Matrices for detecting distant relationships. In Dayhoff, M. O. (ed.) Atlas of Protein Sequence and Structure, National Biomedical Research Foundation, Washington D.C. Vol. 5, Suppl. 3, pp. 345-358; Hein J. (1990) Unified Approach to Alignment and Phylogenes pp. 626-645 Methods in Enzymology vol. 183, Academic Press, Inc., San Diego, Calif.; Higgins, D. G. and Sharp, P. M. (1989) CABIOS 5:151-153; Myers, E. W. and Muller W. (1988) CABIOS 4:11-17; Robinson, E. D. (1971) Comb. Theor 11:105; Santou, N. Nes, M. (1987) Mol. Biol. Evol. 4:406-425; Sneath, P. H. A. and Sokal, R. R. (1973) Numerical Taxonomy—the Principles and Practice of Numerical Taxonomy, Freeman Press, San Francisco, Calif.; Wilbur, W. J. and Lipman, D. J. (1983) Proc. Natl. Acad., Sci. USA 80:726-730.

[1808] Alternatively, optimal alignment of sequences for comparison may be conducted by the local identity algorithm of Smith and Waterman (1981) Add. APL. Math 2:482, by the identity alignment algorithm of Needleman and Wunsch (1970) J. Mol. Biol. 48:443, by the search for similarity methods of Pearson and Lipman (1988) Proc. Natl. Acad. Sci. USA 85: 2444, by computerized implementations of these algorithms (GAP, BESTFIT, BLAST, FASTA, and TFASTA in the Wisconsin Genetics Software Package, Genetics Computer Group (GCG), 575 Science Dr., Madison, Wis.), or by inspection.

[1809] One preferred example of algorithms that are suitable for determining percent sequence identity and sequence similarity are the BLAST and BLAST 2.0 algorithms, which are described in Altschul et al. (1977) Nucl. Acids Res. 25:3389-3402 and Altschul et al. (1990) J. Mol. Biol. 215:403-410, respectively. BLAST and BLAST 2.0 can be used, for example with the parameters described herein, to determine percent sequence identity for the polynucleotides of the invention. Software for performing BLAST analyses is publicly available through the National Center for Biotechnology Information. In one illustrative example, cumulative scores can be calculated using, for nucleotide sequences, the parameters M (reward score for a pair of matching residues; always >0) and N (penalty score for mismatching residues; always <0). Extension of the word hits in each direction are halted when: the cumulative alignment score falls off by the quantity X from its maximum achieved value; the cumulative score goes to zero or below, due to the accumulation of one or more negative-scoring residue alignments; or the end of either sequence is reached. The BLAST algorithm parameters W, T and X determine the sensitivity and speed of the alignment. The BLASTN program (for nucleotide sequences) uses as defaults a wordlength (W) of 11, and expectation (E) of 10, and the BLOSUM62 scoring matrix (see Henikoff and Henikoff (1989) Proc. Natl. Acad. Sci. USA 89:10915) alignments, (B) of 50, expectation (E) of 10, M=5, N=-4 and a comparison of both strands.

[1810] Preferably, the “percentage of sequence identity” is determined by comparing two optimally aligned sequences over a window of comparison of at least 20 positions, wherein the portion of the polynucleotide sequence in the comparison window may comprise additions or deletions (ie., gaps) of 20 percent or less, usually 5 to 15 percent, or 10 to 12 percent, as compared to the reference sequences (which does not comprise additions or deletions) for optimal alignment of the two sequences. The percentage is calculated by determining the number of positions at which the identical nucleic acid bases occurs in both sequences to yield the number of matched positions, dividing the number of matched positions by the total number of positions in the reference sequence (i.e., the window size) and multiplying the results by 100 to yield the percentage of sequence identity.

[1811] It will be appreciated by those of ordinary skill in the art that, as a result of the degeneracy of the genetic code, there are many nucleotide sequences that encode a polypeptide as described herein. Some of these polynucleotides bear minimal homology to the nucleotide sequence of any native gene. Nonetheless, polynucleotides that vary due to differences in codon usage are specifically contemplated by the present invention. Further, alleles of the genes comprising the polynucleotide sequences provided herein are within the scope of the present invention. Alleles are endogenous genes that are altered as a result of one or more mutations, such as deletions, additions and/or substitutions of nucleotides. The resulting mRNA and protein may, but need not, have an altered structure or function. Alleles may be identified using standard techniques (such as hybridization, amplification and/or database sequence comparison).

[1812] Therefore, in another embodiment of the invention, a mutagenesis approach, such as site-specific mutagenesis, is employed for the preparation of immunogenic variants and/or derivatives of the polypeptides described herein. By this approach, specific modifications in a polypeptide sequence can be made through mutagenesis of the underlying polynucleotides that encode them. These techniques provides a straightforward approach to prepare and test sequence variants, for example, incorporating one or more of the foregoing considerations, by introducing one or more nucleotide sequence changes into the polynucleotide.

[1813] Site-specific mutagenesis allows the production of mutants through the use of specific oligonucleotide sequences which encode the DNA sequence of the desired mutation, as well as a sufficient number of adjacent nucleotides, to provide a primer sequence of sufficient size and sequence complexity to form a stable duplex on both sides of the deletion junction being traversed. Mutations may be employed in a selected polynucleotide sequence to improve, alter, decrease, modify, or otherwise change the properties of the polynucleotide itself, and/or alter the properties, activity, composition, stability, or primary sequence of the encoded polypeptide.

[1814] In certain embodiments of the present invention, the inventors contemplate the mutagenesis of the disclosed polynucleotide sequences to alter one or more properties of the encoded polypeptide, such as the immunogenicity of a polypeptide vaccine. The techniques of site-specific mutagenesis are well-known in the art, and are widely used to create variants of both polypeptides and polynucleotides. For example, site-specific mutagenesis is often used to alter a specific portion of a DNA molecule. In such embodiments, a primer comprising typically about 14 to about 25 nucleotides or so in length is employed, with about 5 to about 10 residues on both sides of the junction of the sequence being altered.

[1815] As will be appreciated by those of skill in the art, site-specific mutagenesis techniques have often employed a phage vector that exists in both a single stranded and double stranded form. Typical vectors useful in site-directed mutagenesis include vectors such as the M13 phage. These phage are readily commercially-available and their use is generally well-known to those skilled in the art. Double-stranded plasmids are also routinely employed in site directed mutagenesis that eliminates the step of transferring the gene of interest from a plasmid to a phage.

[1816] In general, site-directed mutagenesis in accordance herewith is performed by first obtaining a single-stranded vector or melting apart of two strands of a double-stranded vector that includes within its sequence a DNA sequence that encodes the desired peptide. An oligonucleotide primer bearing the desired mutated sequence is prepared, generally synthetically. This primer is then annealed with the single-stranded vector, and subjected to DNA polymerizing enzymes such as E. coli polymerase I Klenow fragment, in order to complete the synthesis of the mutation-bearing strand. Thus, a heteroduplex is formed wherein one strand encodes the original non-mutated sequence and the second strand bears the desired mutation. This heteroduplex vector is then used to transform appropriate cells, such as E. coli cells, and clones are selected which include recombinant vectors bearing the mutated sequence arrangement.

[1817] The preparation of sequence variants of the selected peptide-encoding DNA segments using site-directed mutagenesis provides a means of producing potentially useful species and is not meant to be limiting as there are other ways in which sequence variants of peptides and the DNA sequences encoding them may be obtained. For example, recombinant vectors encoding the desired peptide sequence may be treated with mutagenic agents, such as hydroxylamine, to obtain sequence variants. Specific details regarding these methods and protocols are found in the teachings of Maloy et al., 1994; Segal, 1976; Prokop and Bajpai, 1991; Kuby, 1994; and Maniatis et al., 1982, each incorporated herein by reference, for that purpose.

[1818] As used herein, the term “oligonucleotide directed mutagenesis procedure” refers to template-dependent processes and vector-mediated propagation which result in an increase in the concentration of a specific nucleic acid molecule relative to its initial concentration, or in an increase in the concentration of a detectable signal, such as amplification. As used herein, the term “oligonucleotide directed mutagenesis procedure” is intended to refer to a process that involves the template-dependent extension of a primer molecule. The term template dependent process refers to nucleic acid synthesis of an RNA or a DNA molecule wherein the sequence of the newly synthesized strand of nucleic acid is dictated by the well-known rules of complementary base pairing (see, for example, Watson, 1987). Typically, vector mediated methodologies involve the introduction of the nucleic acid fragment into a DNA or RNA vector, the clonal amplification of the vector, and the recovery of the amplified nucleic acid fragment. Examples of such methodologies are provided by U.S. Pat. No. 4,237,224, specifically incorporated herein by reference in its entirety.

[1819] In another approach for the production of polypeptide variants of the present invention, recursive sequence recombination, as described in U.S. Pat. No. 5,837,458, may be employed. In this approach, iterative cycles of recombination and screening or selection are performed to “evolve” individual polynucleotide variants of the invention having, for example, enhanced immunogenic activity.

[1820] In other embodiments of the present invention, the polynucleotide sequences provided herein can be advantageously used as probes or primers for nucleic acid hybridization. As such, it is contemplated that nucleic acid segments that comprise or consist of a sequence region of at least about a 15 nucleotide long contiguous sequence that has the same sequence as, or is complementary to, a 15 nucleotide long contiguous sequence disclosed herein will find particular utility. Longer contiguous identical or complementary sequences, e.g., those of about 20, 30, 40, 50, 100, 200, 500, 1000 (including all intermediate lengths) and even up to full length sequences will also be of use in certain embodiments.

[1821] The ability of such nucleic acid probes to specifically hybridize to a sequence of interest will enable them to be of use in detecting the presence of complementary sequences in a given sample. However, other uses are also envisioned, such as the use of the sequence information for the preparation of mutant species primers, or primers for use in preparing other genetic constructions.

[1822] Polynucleotide molecules having sequence regions consisting of contiguous nucleotide stretches of 10-14, 15-20, 30, 50, or even of 100-200 nucleotides or so (including intermediate lengths as well), identical or complementary to a polynucleotide sequence disclosed herein, are particularly contemplated as hybridization probes for use in, e.g., Southern and Northern blotting. This would allow a gene product, or fragment thereof, to be analyzed, both in diverse cell types and also in various bacterial cells. The total size of fragment, as well as the size of the complementary stretch(es), will ultimately depend on the intended use or application of the particular nucleic acid segment. Smaller fragments will generally find use in hybridization embodiments, wherein the length of the contiguous complementary region may be varied, such as between about 15 and about 100 nucleotides, but larger contiguous complementarity stretches may be used, according to the length complementary sequences one wishes to detect.

[1823] The use of a hybridization probe of about 15-25 nucleotides in length allows the formation of a duplex molecule that is both stable and selective. Molecules having contiguous complementary sequences over stretches greater than 15 bases in length are generally preferred, though, in order to increase stability and selectivity of the hybrid, and thereby improve the quality and degree of specific hybrid molecules obtained. One will generally prefer to design nucleic acid molecules having gene-complementary stretches of 15 to 25 contiguous nucleotides, or even longer where desired.

[1824] Hybridization probes may be selected from any portion of any of the sequences disclosed herein. All that is required is to review the sequences set forth herein, or to any continuous portion of the sequences, from about 15-25 nucleotides in length up to and including the full length sequence, that one wishes to utilize as a probe or primer. The choice of probe and primer sequences may be governed by various factors. For example, one may wish to employ primers from towards the termini of the total sequence.

[1825] Small polynucleotide segments or fragments may be readily prepared by, for example, directly synthesizing the fragment by chemical means, as is commonly practiced using an automated oligonucleotide synthesizer. Also, fragments may be obtained by application of nucleic acid reproduction technology, such as the PCR™ technology of U.S. Pat. No. 4,683,202 (incorporated herein by reference), by introducing selected sequences into recombinant vectors for recombinant production, and by other recombinant DNA techniques generally known to those of skill in the art of molecular biology.

[1826] The nucleotide sequences of the invention may be used for their ability to selectively form duplex molecules with complementary stretches of the entire gene or gene fragments of interest. Depending on the application envisioned, one will typically desire to employ varying conditions of hybridization to achieve varying degrees of selectivity of probe towards target sequence. For applications requiring high selectivity, one will typically desire to employ relatively stringent conditions to form the hybrids, e.g., one will select relatively low salt and/or high temperature conditions, such as provided by a salt concentration of from about 0.02 M to about 0.15 M salt at temperatures of from about 50° C. to about 70° C. Such selective conditions tolerate little, if any, mismatch between the probe and the template or target strand, and would be particularly suitable for isolating related sequences.

[1827] Of course, for some applications, for example, where one desires to prepare mutants employing a mutant primer strand hybridized to an underlying template, less stringent (reduced stringency) hybridization conditions will typically be needed in order to allow formation of the heteroduplex. In these circumstances, one may desire to employ salt conditions such as those of from about 0.15 M to about 0.9 M salt, at temperatures ranging from about 20° C. to about 55° C. Cross-hybridizing species can thereby be readily identified as positively hybridizing signals with respect to control hybridizations. In any case, it is generally appreciated that conditions can be rendered more stringent by the addition of increasing amounts of formamide, which serves to destabilize the hybrid duplex in the same manner as increased temperature. Thus, hybridization conditions can be readily manipulated, and thus will generally be a method of choice depending on the desired results.

[1828] According to another embodiment of the present invention, polynucleotide compositions comprising antisense oligonucleotides are provided. Antisense oligonucleotides have been demonstrated to be effective and targeted inhibitors of protein synthesis, and, consequently, provide a therapeutic approach by which a disease can be treated by inhibiting the synthesis of proteins that contribute to the disease. The efficacy of antisense oligonucleotides for inhibiting protein synthesis is well established. For example, the synthesis of polygalactauronase and the muscarine type 2 acetylcholine receptor are inhibited by antisense oligonucleotides directed to their respective mRNA sequences (U.S. Pat. No. 5,739,119 and U.S. Pat. No. 5,759,829). Further, examples of antisense inhibition have been demonstrated with the nuclear protein cyclin, the multiple drug resistance gene (MDG1), ICAM-1, E-selectin, STK-1, striatal GABAA receptor and human EGF (Jaskulski et al., Science. 1988 Jun 10;240(4858):1544-6; Vasanthakumar and Ahmed, Cancer Commun. 1989;1 (4):225-32; Peris et al., Brain Res Mol Brain Res. 1998 Jun 15;57(2):310-20; U.S. Pat. No. 5,801,154; U.S. Pat. No. 5,789,573; U.S. Pat. No. 5,718,709 and U.S. Pat. No. 5,610,288). Antisense constructs have also been described that inhibit and can be used to treat a variety of abnormal cellular proliferations, e.g. cancer (U.S. Pat. No. 5,747,470; U.S. Pat. No. 5,591,317 and U.S. Pat. No. 5,783,683).

[1829] Therefore, in certain embodiments, the present invention provides oligonucleotide sequences that comprise all, or a portion of, any sequence that is capable of specifically binding to polynucleotide sequence described herein, or a complement thereof. In one embodiment, the antisense oligonucleotides comprise DNA or derivatives thereof. In another embodiment, the oligonucleotides comprise RNA or derivatives thereof. In a third embodiment, the oligonucleotides are modified DNAs comprising a phosphorothioated modified backbone. In a fourth embodiment, the oligonucleotide sequences comprise peptide nucleic acids or derivatives thereof. In each case, preferred compositions comprise a sequence region that is complementary, and more preferably substantially-complementary, and even more preferably, completely complementary to one or more portions of polynucleotides disclosed herein. Selection of antisense compositions specific for a given gene sequence is based upon analysis of the chosen target sequence and determination of secondary structure, Tm, binding energy, and relative stability. Antisense compositions may be selected based upon their relative inability to form dimers, hairpins, or other secondary structures that would reduce or prohibit specific binding to the target mRNA in a host cell. Highly preferred target regions of the mRNA, are those which are at or near the AUG translation initiation codon, and those sequences which are substantially complementary to 5′ regions of the mRNA. These secondary structure analyses and target site selection considerations can be performed, for example, using v.4 of the OLIGO primer analysis software and/or the BLASTN 2.0.5 algorithm software (Altschul et al., Nucleic Acids Res. 1997, 25(17):3389-402).

[1830] The use of an antisense delivery method employing a short peptide vector, termed MPG (27 residues), is also contemplated. The MPG peptide contains a hydrophobic domain derived from the fusion sequence of HIV gp41 and a hydrophilic domain from the nuclear localization sequence of SV40 T-antigen (Morris et al., Nucleic Acids Res. Jul. 15, 1997;25(14):2730-6). It has been demonstrated that several molecules of the MPG peptide coat the antisense oligonucleotides and can be delivered into cultured mammalian cells in less than 1 hour with relatively high efficiency (90%). Further, the interaction with MPG strongly increases both the stability of the oligonucleotide to nuclease and the ability to cross the plasma membrane.

[1831] According to another embodiment of the invention, the polynucleotide compositions described herein are used in the design and preparation of ribozyme molecules for inhibiting expression of the tumor polypeptides and proteins of the present invention in tumor cells. Ribozymes are RNA-protein complexes that cleave nucleic acids in a site-specific fashion. Ribozymes have specific catalytic domains that possess endonuclease activity (Kim and Cech, Proc Natl Acad Sci U S A. 1987 December;84(24):8788-92; Forster and Symons, Cell. Apr. 24, 1987;49(2):211-20). For example, a large number of ribozymes accelerate phosphoester transfer reactions with a high degree of specificity, often cleaving only one of several phosphoesters in an oligonucleotide substrate (Cech et al., Cell. 1981 December;27(3 Pt 2):487-96; Michel and Westhof, J. Mol. Biol. Dec. 5, 1990;216(3):585-610; Reinhold-Hurek and Shub, Nature. May 14, 1992;357(6374):173-6). This specificity has been attributed to the requirement that the substrate bind via specific base-pairing interactions to the internal guide sequence (“IGS”) of the ribozyme prior to chemical reaction.

[1832] Six basic varieties of naturally-occurring enzymatic RNAs are known presently. Each can catalyze the hydrolysis of RNA phosphodiester bonds in trans (and thus can cleave other RNA molecules) under physiological conditions. In general, enzymatic nucleic acids act by first binding to a target RNA. Such binding occurs through the target binding portion of a enzymatic nucleic acid which is held in close proximity to an enzymatic portion of the molecule that acts to cleave the target RNA. Thus, the enzymatic nucleic acid first recognizes and then binds a target RNA through complementary base-pairing, and once bound to the correct site, acts enzymatically to cut the target RNA. Strategic cleavage of such a target RNA will destroy its ability to direct synthesis of an encoded protein. After an enzymatic nucleic acid has bound and cleaved its RNA target, it is released from that RNA to search for another target and can repeatedly bind and cleave new targets.

[1833] The enzymatic nature of a ribozyme is advantageous over many technologies, such as antisense technology (where a nucleic acid molecule simply binds to a nucleic acid target to block its translation) since the concentration of ribozyme necessary to affect a therapeutic treatment is lower than that of an antisense oligonucleotide. This advantage reflects the ability of the ribozyme to act enzymatically. Thus, a single ribozyme molecule is able to cleave many molecules of target RNA. In addition, the ribozyme is a highly specific inhibitor, with the specificity of inhibition depending not only on the base pairing mechanism of binding to the target RNA, but also on the mechanism of target RNA cleavage. Single mismatches, or base-substitutions, near the site of cleavage can completely eliminate catalytic activity of a ribozyme. Similar mismatches in antisense molecules do not prevent their action (Woolf et al., Proc Natl Acad Sci U S A. Aug. 15, 1992;89(16):7305-9). Thus, the specificity of action of a ribozyme is greater than that of an antisense oligonucleotide binding the same RNA site.

[1834] The enzymatic nucleic acid molecule may be formed in a hammerhead, hairpin, a hepatitis δ virus, group I intron or RNaseP RNA (in association with an RNA guide sequence) or Neurospora VS RNA motif. Examples of hammerhead motifs are described by Rossi et al. Nucleic Acids Res. Sep. 11, 1992;20(17):4559-65. Examples of hairpin motifs are described by Hampel et al. (Eur. Pat. Appl. PubI. No. EP 0360257), Hampel and Tritz, Biochemistry Jun. 13, 1989;28(12):4929-33; Hampel et al., Nucleic Acids Res. Jan. 25, 1990;18(2):299-304 and U.S. Pat. No. 5,631,359. An example of the hepatitis δ virus motif is described by Perrotta and Been, Biochemistry. Dec. 1, 1992;31 (47):11843-52; an example of the RNaseP motif is described by Guerrier-Takada et al., Cell. 1983 December;35(3 Pt 2):849-57; Neurospora VS RNA ribozyme motif is described by Collins (Saville and Collins, Cell. May 18, 1990;61 (4):685-96; Saville and Collins, Proc Natl Acad Sci U S A. Oct. 1, 1991;88(19):8826-30; Collins and Olive, Biochemistry. Mar. 23, 1993;32(11):2795-9); and an example of the Group I intron is described in (U.S. Pat. No. 4,987,071). All that is important in an enzymatic nucleic acid molecule of this invention is that it has a specific substrate binding site which is complementary to one or more of the target gene RNA regions, and that it have nucleotide sequences within or surrounding that substrate binding site which impart an RNA cleaving activity to the molecule. Thus the ribozyme constructs need not be limited to specific motifs mentioned herein.

[1835] Ribozymes may be designed as described in Int. Pat. Appl. Publ. No. WO 93/23569 and Int. Pat. Appl. Publ. No. WO 94/02595, each specifically incorporated herein by reference) and synthesized to be tested in vitro and in vivo, as described. Such ribozymes can also be optimized for delivery. While specific examples are provided, those in the art will recognize that equivalent RNA targets in other species can be utilized when necessary.

[1836] Ribozyme activity can be optimized by altering the length of the ribozyme binding arms, or chemically synthesizing ribozymes with modifications that prevent their degradation by serum ribonucleases (see e.g., Int. Pat. Appl. Publ. No. WO 92/07065; Int. Pat. Appl. Publ. No. WO 93/15187; Int. Pat. Appl. Publ. No. WO 91/03162; Eur. Pat. Appi. Publ. No. 92110298.4; U.S. Pat. No. 5,334,711; and Int. Pat. Appl. Publ. No. WO 94/13688, which describe various chemical modifications that can be made to the sugar moieties of enzymatic RNA molecules), modifications which enhance their efficacy in cells, and removal of stem 11 bases to shorten RNA synthesis times and reduce chemical requirements.

[1837] Sullivan et al. (Int. Pat. Appi. Publ. No. WO 94/02595) describes the general methods for delivery of enzymatic RNA molecules. Ribozymes may be administered to cells by a variety of methods known to those familiar to the art, including, but not restricted to, encapsulation in liposomes, by iontophoresis, or by incorporation into other vehicles, such as hydrogels, cyclodextrins, biodegradable nanocapsules, and bioadhesive microspheres. For some indications, ribozymes may be directly delivered ex vivo to cells or tissues with or without the aforementioned vehicles. Alternatively, the RNA/vehicle combination may be locally delivered by direct inhalation, by direct injection or by use of a catheter, infusion pump or stent. Other routes of delivery include, but are not limited to, intravascular, intramuscular, subcutaneous or joint injection, aerosol inhalation, oral (tablet or pill form), topical, systemic, ocular, intraperitoneal and/or intrathecal delivery. More detailed descriptions of ribozyme delivery and administration are provided in Int. Pat. Appl. Publ. No. WO 94/02595 and Int. Pat. Appl. Pubi. No. WO 93/23569, each specifically incorporated herein by reference.

[1838] Another means of accumulating high concentrations of a ribozyme(s) within cells is to incorporate the ribozyme-encoding sequences into a DNA expression vector. Transcription of the ribozyme sequences are driven from a promoter for eukaryotic RNA polymerase I (pol I), RNA polymerase II (pol II), or RNA polymerase III (pol III). Transcripts from pol II or pol III promoters will be expressed at high levels in all cells; the levels of a given pol II promoter in a given cell type will depend on the nature of the gene regulatory sequences (enhancers, silencers, etc.) present nearby. Prokaryotic RNA polymerase promoters may also be used, providing that the prokaryotic RNA polymerase enzyme is expressed in the appropriate cells Ribozymes expressed from such promoters have been shown to function in mammalian cells. Such transcription units can be incorporated into a variety of vectors for introduction into mammalian cells, including but not restricted to, plasmid DNA vectors, viral DNA vectors (such as adenovirus or adeno-associated vectors), or viral RNA vectors (such as retroviral, semliki forest virus, sindbis virus vectors).

[1839] In another embodiment of the invention, peptide nucleic acids (PNAs) compositions are provided. PNA is a DNA mimic in which the nucleobases are attached to a pseudopeptide backbone (Good and Nielsen, Antisense Nucleic Acid Drug Dev. 1997 7(4) 431-37). PNA is able to be utilized in a number methods that traditionally have used RNA or DNA. Often PNA sequences perform better in techniques than the corresponding RNA or DNA sequences and have utilities that are not inherent to RNA or DNA. A review of PNA including methods of making, characteristics of, and methods of using, is provided by Corey (Trends Biotechnol 1997 June;15(6):224-9). As such, in certain embodiments, one may prepare PNA sequences that are complementary to one or more portions of the ACE mRNA sequence, and such PNA compositions may be used to regulate, alter, decrease, or reduce the translation of ACE-specific mRNA, and thereby alter the level of ACE activity in a host cell to which such PNA compositions have been administered.

[1840] PNAs have 2-aminoethyl-glycine linkages replacing the normal phosphodiester backbone of DNA (Nielsen et al., Science Dec. 6, 1991;254(5037):1497-500; Hanvey et al., Science. Nov. 27, 1992;258(5087):1481-5; Hyrup and Nielsen, Bioorg Med Chem. 1996 January;4(1):5-23). This chemistry has three important consequences: firstly, in contrast to DNA or phosphorothioate oligonucleotides, PNAs are neutral molecules; secondly, PNAs are achiral, which avoids the need to develop a stereoselective synthesis; and thirdly, PNA synthesis uses standard Boc or Fmoc protocols for solid-phase peptide synthesis, although other methods, including a modified Merrifield method, have been used.

[1841] PNA monomers or ready-made oligomers are commercially available from PerSeptive Biosystems (Framingham, Mass.). PNA syntheses by either Boc or Fmoc protocols are straightforward using manual or automated protocols (Norton et al., Bioorg Med Chem. 1995 April;3(4):437-45). The manual protocol lends itself to the production of chemically modified PNAs or the simultaneous synthesis of families of closely related PNAs.

[1842] As with peptide synthesis, the success of a particular PNA synthesis will depend on the properties of the chosen sequence. For example, while in theory PNAs can incorporate any combination of nucleotide bases, the presence of adjacent purines can lead to deletions of one or more residues in the product. In expectation of this difficulty, it is suggested that, in producing PNAs with adjacent purines, one should repeat the coupling of residues likely to be added inefficiently. This should be followed by the purification of PNAs by reverse-phase high-pressure liquid chromatography, providing yields and purity of product similar to those observed during the synthesis of peptides.

[1843] Modifications of PNAs for a given application may be accomplished by coupling amino acids during solid-phase synthesis or by attaching compounds that contain a carboxylic acid group to the exposed N-terminal amine. Alternatively, PNAs can be modified after synthesis by coupling to an introduced lysine or cysteine. The ease with which PNAs can be modified facilitates optimization for better solubility or for specific functional requirements. Once synthesized, the identity of PNAs and their derivatives can be confirmed by mass spectrometry. Several studies have made and utilized modifications of PNAs (for example, Norton et al., Bioorg Med Chem. 1995 April;3(4):437-45; Petersen et al., J Pept Sci. 1995 May-June;1 (3):175-83; Orum et al., Biotechniques. 1995 September;19(3):472-80; Footer et al., Biochemistry. Aug. 20, 1996;35(33):10673-9; Griffith et al., Nucleic Acids Res. Aug. 11, 1995;23(15):3003-8; Pardridge et al., Proc Natl Acad Sci U S A. Jun. 6, 1995;92(12):5592-6; Boffa et al., Proc Natl Acad Sci U S A. Mar. 14, 1995;92(6):1901-5; Gambacorti-Passerini et al., Blood. Aug. 15, 1997;88(4):1411-7; Armitage et al., Proc Natl Acad Sci U S A. Nov. 11, 1997;94(23):12320-5; Seeger et al., Biotechniques. 1997 September;23(3):512-7). U.S. Pat. No. 5,700,922 discusses PNA-DNA—PNA chimeric molecules and their uses in diagnostics, modulating protein in organisms, and treatment of conditions susceptible to therapeutics.

[1844] Methods of characterizing the antisense binding properties of PNAs are discussed in Rose (Anal Chem. Dec. 15, 1993;65(24):3545-9) and Jensen et al. (Biochemistry. Apr. 22, 1997;36(16):5072-7). Rose uses capillary gel electrophoresis to determine binding of PNAs to their complementary oligonucleotide, measuring the relative binding kinetics and stoichiometry. Similar types of measurements were made by Jensen et al. using BIAcore™ technology.

[1845] Other applications of PNAs that have been described and will be apparent to the skilled artisan include use in DNA strand invasion, antisense inhibition, mutational analysis, enhancers of transcription, nucleic acid purification, isolation of transcriptionally active genes, blocking of transcription factor binding, genome cleavage, biosensors, in situ hybridization, and the like.

[1846] Polynucleotide Identification, Characterization and Expression

[1847] Polynucleotides compositions of the present invention may be identified, prepared and/or manipulated using any of a variety of well established techniques (see generally, Sambrook et al., Molecular Cloning: A Laboratory Manual, Cold Spring Harbor Laboratories, Cold Spring Harbor, N.Y., 1989, and other like references). For example, a polynucleotide may be identified, as described in more detail below, by screening a microarray of cDNAs for tumor-associated expression (i.e., expression that is at least two fold greater in a tumor than in normal tissue, as determined using a representative assay provided herein). Such screens may be performed, for example, using the microarray technology of Affymetrix, Inc. (Santa Clara, Calif.) according to the manufacturer's instructions (and essentially as described by Schena et al., Proc. Natl. Acad. Sci. USA 93:10614-10619, 1996 and Heller et al., Proc. Natl. Acad. Sci. USA 94:2150-2155, 1997). Alternatively, polynucleotides may be amplified from cDNA prepared from cells expressing the proteins described herein, such as tumor cells.

[1848] Many template dependent processes are available to amplify a target sequences of interest present in a sample. One of the best known amplification methods is the polymerase chain reaction (PCR™) which is described in detail in U.S. Pat. Nos. 4,683,195, 4,683,202 and 4,800,159, each of which is incorporated herein by reference in its entirety. Briefly, in PCR™, two primer sequences are prepared which are complementary to regions on opposite complementary strands of the target sequence. An excess of deoxynucleoside triphosphates is added to a reaction mixture along with a DNA polymerase (e.g., Taq polymerase). If the target sequence is present in a sample, the primers will bind to the target and the polymerase will cause the primers to be extended along the target sequence by adding on nucleotides. By raising and lowering the temperature of the reaction mixture, the extended primers will dissociate from the target to form reaction products, excess primers will bind to the target and to the reaction product and the process is repeated. Preferably reverse transcription and PCR T amplification procedure may be performed in order to quantify the amount of mRNA amplified. Polymerase chain reaction methodologies are well known in the art.

[1849] Any of a number of other template dependent processes, many of which are variations of the PCR ™ amplification technique, are readily known and available in the art. Illustratively, some such methods include the ligase chain reaction (referred to as LCR), described, for example, in Eur. Pat. Appl. Publ. No. 320,308 and U.S. Pat. No. 4,883,750; Qbeta Replicase, described in PCT Intl. Pat. Appl. PubI. No. PCT/US87/00880; Strand Displacement Amplification (SDA) and Repair Chain Reaction (RCR). Still other amplification methods are described in Great Britain Pat. Appl. No. 2 202 328, and in PCT Intl. Pat. Appi. Publ. No. PCT/US89/01025. Other nucleic acid amplification procedures include transcription-based amplification systems (TAS) (PCT Intl. Pat. Appi. PubI. No. WO 88/10315), including nucleic acid sequence based amplification (NASBA) and 3SR. Eur. Pat. Appl. Publ. No. 329,822 describes a nucleic acid amplification process involving cyclically synthesizing single-stranded RNA (“ssRNA”), ssDNA, and double-stranded DNA (dsDNA). PCT Intl. Pat. Appl. PubI. No. WO 89/06700 describes a nucleic acid sequence amplification scheme based on the hybridization of a promoter/primer sequence to a target single-stranded DNA (“ssDNA”) followed by transcription of many RNA copies of the sequence. Other amplification methods such as “RACE” (Frohman, 1990), and “one-sided PCR” (Ohara, 1989) are also well-known to those of skill in the art.

[1850] An amplified portion of a polynucleotide of the present invention may be used to isolate a full length gene from a suitable library (e.g., a tumor cDNA library) using well known techniques. Within such techniques, a library (cDNA or genomic) is screened using one or more polynucleotide probes or primers suitable for amplification. Preferably, a library is size-selected to include larger molecules. Random primed libraries may also be preferred for identifying 5′ and upstream regions of genes. Genomic libraries are preferred for obtaining introns and extending 5′ sequences.

[1851] For hybridization techniques, a partial sequence may be labeled (e.g., by nick-translation or end-labeling with ³²P) using well known techniques. A bacterial or bacteriophage library is then generally screened by hybridizing filters containing denatured bacterial colonies (or lawns containing phage plaques) with the labeled probe (see Sambrook et al., Molecular Cloning: A Laboratory Manual, Cold Spring Harbor Laboratories, Cold Spring Harbor, N.Y., 1989). Hybridizing colonies or plaques are selected and expanded, and the DNA is isolated for further analysis. cDNA clones may be analyzed to determine the amount of additional sequence by, for example, PCR using a primer from the partial sequence and a primer from the vector. Restriction maps and partial sequences may be generated to identify one or more overlapping clones. The complete sequence may then be determined using standard techniques, which may involve generating a series of deletion clones. The resulting overlapping sequences can then assembled into a single contiguous sequence. A full length cDNA molecule can be generated by ligating suitable fragments, using well known techniques.

[1852] Alternatively, amplification techniques, such as those described above, can be useful for obtaining a full length coding sequence from a partial cDNA sequence. One such amplification technique is inverse PCR (see Triglia et al., Nucl. Acids Res. 16:8186, 1988), which uses restriction enzymes to generate a fragment in the known region of the gene. The fragment is then circularized by intramolecular ligation and used as a template for PCR with divergent primers derived from the known region. Within an alternative approach, sequences adjacent to a partial sequence may be retrieved by amplification with a primer to a linker sequence and a primer specific to a known region. The amplified sequences are typically subjected to a second round of amplification with the same linker primer and a second primer specific to the known region. A variation on this procedure, which employs two primers that initiate extension in opposite directions from the known sequence, is described in WO 96/38591. Another such technique is known as “rapid amplification of cDNA ends” or RACE. This technique involves the use of an internal primer and an external primer, which hybridizes to a polyA region or vector sequence, to identify sequences that are 5′ and 3′ of a known sequence. Additional techniques include capture PCR (Lagerstrom et al., PCR Methods Applic. 1:111-19, 1991) and walking PCR (Parker et al., Nucl. Acids. Res. 19:3055-60, 1991). Other methods employing amplification may also be employed to obtain a full length cDNA sequence.

[1853] In certain instances, it is possible to obtain a full length cDNA sequence by analysis of sequences provided in an expressed sequence tag (EST) database, such as that available from GenBank. Searches for overlapping ESTs may generally be performed using well known programs (e.g., NCBI BLAST searches), and such ESTs may be used to generate a contiguous full length sequence. Full length DNA sequences may also be obtained by analysis of genomic fragments.

[1854] In other embodiments of the invention, polynucleotide sequences or fragments thereof which encode polypeptides of the invention, or fusion proteins or functional equivalents thereof, may be used in recombinant DNA molecules to direct expression of a polypeptide in appropriate host cells. Due to the inherent degeneracy of the genetic code, other DNA sequences that encode substantially the same or a functionally equivalent amino acid sequence may be produced and these sequences may be used to clone and express a given polypeptide.

[1855] As will be understood by those of skill in the art, it may be advantageous in some instances to produce polypeptide-encoding nucleotide sequences possessing non-naturally occurring codons. For example, codons preferred by a particular prokaryotic or eukaryotic host can be selected to increase the rate of protein expression or to produce a recombinant RNA transcript having desirable properties, such as a half-life which is longer than that of a transcript generated from the naturally occurring sequence.

[1856] Moreover, the polynucleotide sequences of the present invention can be engineered using methods generally known in the art in order to alter polypeptide encoding sequences for a variety of reasons, including but not limited to, alterations which modify the cloning, processing, and/or expression of the gene product. For example, DNA shuffling by random fragmentation and PCR reassembly of gene fragments and synthetic oligonucleotides may be used to engineer the nucleotide sequences. In addition, site-directed mutagenesis may be used to insert new restriction sites, alter glycosylation patterns, change codon preference, produce splice variants, or introduce mutations, and so forth.

[1857] In another embodiment of the invention, natural, modified, or recombinant nucleic acid sequences may be ligated to a heterologous sequence to encode a fusion protein. For example, to screen peptide libraries for inhibitors of polypeptide activity, it may be useful to encode a chimeric protein that can be recognized by a commercially available antibody. A fusion protein may also be engineered to contain a cleavage site located between the polypeptide-encoding sequence and the heterologous protein sequence, so that the polypeptide may be cleaved and purified away from the heterologous moiety.

[1858] Sequences encoding a desired polypeptide may be synthesized, in whole or in part, using chemical methods well known in the art (see Caruthers, M. H. et al. (1980) Nucl. Acids Res. Symp. Ser. 215-223, Horn, T. et al. (1980) Nucl. Acids Res. Symp. Ser. 225-232). Alternatively, the protein itself may be produced using chemical methods to synthesize the amino acid sequence of a polypeptide, or a portion thereof. For example, peptide synthesis can be performed using various solid-phase techniques (Roberge, J. Y. et al. (1995) Science 269:202-204) and automated synthesis may be achieved, for example, using the ABI 431 A Peptide Synthesizer (Perkin Elmer, Palo Alto, Calif.).

[1859] A newly synthesized peptide may be substantially purified by preparative high performance liquid chromatography (e.g., Creighton, T. (1983) Proteins, Structures and Molecular Principles, WH Freeman and Co., New York, N.Y.) or other comparable techniques available in the art. The composition of the synthetic peptides may be confirmed by amino acid analysis or sequencing (e.g., the Edman degradation procedure). Additionally, the amino acid sequence of a polypeptide, or any part thereof, may be altered during direct synthesis and/or combined using chemical methods with sequences from other proteins, or any part thereof, to produce a variant polypeptide.

[1860] In order to express a desired polypeptide, the nucleotide sequences encoding the polypeptide, or functional equivalents, may be inserted into appropriate expression vector, i.e., a vector which contains the necessary elements for the transcription and translation of the inserted coding sequence. Methods which are well known to those skilled in the art may be used to construct expression vectors containing sequences encoding a polypeptide of interest and appropriate transcriptional and translational control elements. These methods include in vitro recombinant DNA techniques, synthetic techniques, and in vivo genetic recombination. Such techniques are described, for example, in Sambrook, J. et al. (1989) Molecular Cloning, A Laboratory Manual, Cold Spring Harbor Press, Plainview, N.Y., and Ausubel, F. M. et al. (1989) Current Protocols in Molecular Biology, John Wiley & Sons, New York. N.Y.

[1861] A variety of expression vector/host systems may be utilized to contain and express polynucleotide sequences. These include, but are not limited to, microorganisms such as bacteria transformed with recombinant bacteriophage, plasmid, or cosmid DNA expression vectors; yeast transformed with yeast expression vectors; insect cell systems infected with virus expression vectors (e.g., baculovirus); plant cell systems transformed with virus expression vectors (e.g., cauliflower mosaic virus, CaMV; tobacco mosaic virus, TMV) or with bacterial expression vectors (e.g., Ti or pBR322 plasmids); or animal cell systems.

[1862] The “control elements” or “regulatory sequences” present in an expression vector are those non-translated regions of the vector—enhancers, promoters, 5′ and 3′ untranslated regions—which interact with host cellular proteins to carry out transcription and translation. Such elements may vary in their strength and specificity. Depending on the vector system and host utilized, any number of suitable transcription and translation elements, including constitutive and inducible promoters, may be used. For example, when cloning in bacterial systems, inducible promoters such as the hybrid lacZ promoter of the pBLUESCRIPT phagemid (Stratagene, La Jolla, Calif.) or pSPORT1 plasmid (Gibco BRL, Gaithersburg, Md.) and the like may be used. In mammalian cell systems, promoters from mammalian genes or from mammalian viruses are generally preferred. If it is necessary to generate a cell line that contains multiple copies of the sequence encoding a polypeptide, vectors based on SV40 or EBV may be advantageously used with an appropriate selectable marker.

[1863] In bacterial systems, any of a number of expression vectors may be selected depending upon the use intended for the expressed polypeptide. For example, when large quantities are needed, for example for the induction of antibodies, vectors which direct high level expression of fusion proteins that are readily purified may be used. Such vectors include, but are not limited to, the multifunctional E. coli cloning and expression vectors such as pBLUESCRIPT (Stratagene), in which the sequence encoding the polypeptide of interest may be ligated into the vector in frame with sequences for the amino-terminal Met and the subsequent 7 residues of .beta.-galactosidase so that a hybrid protein is produced; pIN vectors (Van Heeke, G. and S. M. Schuster (1989) J. Biol. Chem. 264:5503-5509); and the like. pGEX Vectors (Promega, Madison, Wis.) may also be used to express foreign polypeptides as fusion proteins with glutathione S-transferase (GST). In general, such fusion proteins are soluble and can easily be purified from lysed cells by adsorption to glutathione-agarose beads followed by elution in the presence of free glutathione. Proteins made in such systems may be designed to include heparin, thrombin, or factor XA protease cleavage sites so that the cloned polypeptide of interest can be released from the GST moiety at will.

[1864] In the yeast, Saccharomyces cerevisiae, a number of vectors containing constitutive or inducible promoters such as alpha factor, alcohol oxidase, and PGH may be used. For reviews, see Ausubel et al. (supra) and Grant et al. (1987) Methods Enzymol. 153:516-544.

[1865] In cases where plant expression vectors are used, the expression of sequences encoding polypeptides may be driven by any of a number of promoters. For example, viral promoters such as the 35S and 19S promoters of CaMV may be used alone or in combination with the omega leader sequence from TMV (Takamatsu, N. (1987) EMBO J. 6:307-311. Alternatively, plant promoters such as the small subunit of RUBISCO or heat shock promoters may be used (Coruzzi, G. et al. (1984) EMBO J. 3:1671-1680; Broglie, R. et al. (1984) Science 224:838-843; and Winter, J. et al. (1991) Results Probl. Cell Differ. 17:85-105). These constructs can be introduced into plant cells by direct DNA transformation or pathogen-mediated transfection. Such techniques are described in a number of generally available reviews (see, for example, Hobbs, S. or Murry, L. E. in McGraw Hill Yearbook of Science and Technology (1992) McGraw Hill, New York, N.Y.; pp. 191-196).

[1866] An insect system may also be used to express a polypeptide of interest. For example, in one such system, Autographa californica nuclear polyhedrosis virus (AcNPV) is used as a vector to express foreign genes in Spodoptera frugiperda cells or in Trichoplusia larvae. The sequences encoding the polypeptide may be cloned into a non-essential region of the virus, such as the polyhedrin gene, and placed under control of the polyhedrin promoter. Successful insertion of the polypeptide-encoding sequence will render the polyhedrin gene inactive and produce recombinant virus lacking coat protein. The recombinant viruses may then be used to infect, for example, S. frugiperda cells or Trichoplusia larvae in which the polypeptide of interest may be expressed (Engelhard, E. K. et al. (1994) Proc. Natl. Acad. Sci. 91 :3224-3227).

[1867] In mammalian host cells, a number of viral-based expression systems are generally available. For example, in cases where an adenovirus is used as an expression vector, sequences encoding a polypeptide of interest may be ligated into an adenovirus transcription/translation complex consisting of the late promoter and tripartite leader sequence. Insertion in a non-essential E1 or E3 region of the viral genome may be used to obtain a viable virus which is capable of expressing the polypeptide in infected host cells (Logan, J. and Shenk, T. (1984) Proc. Natl. Acad. Sci. 81:3655-3659). In addition, transcription enhancers, such as the Rous sarcoma virus (RSV) enhancer, may be used to increase expression in mammalian host cells.

[1868] Specific initiation signals may also be used to achieve more efficient translation of sequences encoding a polypeptide of interest. Such signals include the ATG initiation codon and adjacent sequences. In cases where sequences encoding the polypeptide, its initiation codon, and upstream sequences are inserted into the appropriate expression vector, no additional transcriptional or translational control signals may be needed. However, in cases where only coding sequence, or a portion thereof, is inserted, exogenous translational control signals including the ATG initiation codon should be provided. Furthermore, the initiation codon should be in the correct reading frame to ensure translation of the entire insert. Exogenous translational elements and initiation codons may be of various origins, both natural and synthetic. The efficiency of expression may be enhanced by the inclusion of enhancers which are appropriate for the particular cell system which is used, such as those described in the literature (Scharf, D. et al. (1994) Results Probl. Cell Differ. 20:125-162).

[1869] In addition, a host cell strain may be chosen for its ability to modulate the expression of the inserted sequences or to process the expressed protein in the desired fashion. Such modifications of the polypeptide include, but are not limited to, acetylation, carboxylation. glycosylation, phosphorylation, lipidation, and acylation. Post-translational processing which cleaves a “prepro” form of the protein may also be used to facilitate correct insertion, folding and/or function. Different host cells such as CHO, COS, HeLa, MDCK, HEK293, and W138, which have specific cellular machinery and characteristic mechanisms for such post-translational activities, may be chosen to ensure the correct modification and processing of the foreign protein.

[1870] For long-term, high-yield production of recombinant proteins, stable expression is generally preferred. For example, cell lines which stably express a polynucleotide of interest may be transformed using expression vectors which may contain viral origins of replication and/or endogenous expression elements and a selectable marker gene on the same or on a separate vector. Following the introduction of the vector, cells may be allowed to grow for 1-2 days in an enriched media before they are switched to selective media. The purpose of the selectable marker is to confer resistance to selection, and its presence allows growth and recovery of cells which successfully express the introduced sequences. Resistant clones of stably transformed cells may be proliferated using tissue culture techniques appropriate to the cell type.

[1871] Any number of selection systems may be used to recover transformed cell lines. These include, but are not limited to, the herpes simplex virus thymidine kinase (Wigler, M. et al. (1977) Cell 11:223-32) and adenine phosphoribosyltransferase (Lowy, I. et al. (1990) Cell 22:817-23) genes which can be employed in tk.sup.- or aprt.sup.-cells, respectively. Also, antimetabolite, antibiotic or herbicide resistance can be used as the basis for selection; for example, dhfr which confers resistance to methotrexate (Wigler, M. et al. (1980) Proc. Natl. Acad. Sci. 77:3567-70); npt, which confers resistance to the aminoglycosides, neomycin and G-418 (Colbere-Garapin, F. et al (1981) J. Mol. Biol. 150:1-14); and als or pat, which confer resistance to chlorsulfuron and phosphinotricin acetyltransferase, respectively (Murry, supra). Additional selectable genes have been described, for example, trpB, which allows cells to utilize indole in place of tryptophan, or hisD, which allows cells to utilize histinol in place of histidine (Hartman, S. C. and R. C. Mulligan (1988) Proc. Natl. Acad. Sci. 85:8047-51). The use of visible markers has gained popularity with such markers as anthocyanins, beta-glucuronidase and its substrate GUS, and luciferase and its substrate luciferin, being widely used not only to identify transformants, but also to quantify the amount of transient or stable protein expression attributable to a specific vector system (Rhodes, C. A. et al. (1995) Methods Mol. Biol. 55:121-131).

[1872] Although the presence/absence of marker gene expression suggests that the gene of interest is also present, its presence and expression may need to be confirmed. For example, if the sequence encoding a polypeptide is inserted within a marker gene sequence, recombinant cells containing sequences can be identified by the absence of marker gene function. Alternatively, a marker gene can be placed in tandem with a polypeptide-encoding sequence under the control of a single promoter. Expression of the marker gene in response to induction or selection usually indicates expression of the tandem gene as well.

[1873] Alternatively, host cells that contain and express a desired polynucleotide sequence may be identified by a variety of procedures known to those of skill in the art. These procedures include, but are not limited to, DNA-DNA or DNA—RNA hybridizations and protein bioassay or immunoassay techniques which include, for example, membrane, solution, or chip based technologies for the detection and/or quantification of nucleic acid or protein.

[1874] A variety of protocols for detecting and measuring the expression of polynucleotide-encoded products, using either polyclonal or monoclonal antibodies specific for the product are known in the art. Examples include enzyme-linked immunosorbent assay (ELISA), radioimmunoassay (RIA), and fluorescence activated cell sorting (FACS). A two-site, monoclonal-based immunoassay utilizing monoclonal antibodies reactive to two non-interfering epitopes on a given polypeptide may be preferred for some applications, but a competitive binding assay may also be employed. These and other assays are described, among other places, in Hampton, R. et al. (1990; Serological Methods, a Laboratory Manual, APS Press, St Paul. Minn.) and Maddox, D. E. et al. (1983; J. Exp. Med. 158:1211-1216).

[1875] A wide variety of labels and conjugation techniques are known by those skilled in the art and may be used in various nucleic acid and amino acid assays. Means for producing labeled hybridization or PCR probes for detecting sequences related to polynucleotides include oligolabeling, nick translation, end-labeling or PCR amplification using a labeled nucleotide. Alternatively, the sequences, or any portions thereof may be cloned into a vector for the production of an mRNA probe. Such vectors are known in the art, are commercially available, and may be used to synthesize RNA probes in vitro by addition of an appropriate RNA polymerase such as T7, T3, or SP6 and labeled nucleotides. These procedures may be conducted using a variety of commercially available kits.

[1876] Suitable reporter molecules or labels, which may be used include radionuclides, enzymes, fluorescent, chemiluminescent, or chromogenic agents as well as substrates, cofactors, inhibitors, magnetic particles, and the like.

[1877] Host cells transformed with a polynucleotide sequence of interest may be cultured under conditions suitable for the expression and recovery of the protein from cell culture. The protein produced by a recombinant cell may be secreted or contained intracellularly depending on the sequence and/or the vector used. As will be understood by those of skill in the art, expression vectors containing polynucleotides of the invention may be designed to contain signal sequences which direct secretion of the encoded polypeptide through a prokaryotic or eukaryotic cell membrane. Other recombinant constructions may be used to join sequences encoding a polypeptide of interest to nucleotide sequence encoding a polypeptide domain which will facilitate purification of soluble proteins.

[1878] Such purification facilitating domains include, but are not limited to, metal chelating peptides such as histidine-tryptophan modules that allow purification on immobilized metals, protein A domains that allow purification on immobilized immunoglobulin, and the domain utilized in the FLAGS extension/affinity purification system (Immunex Corp., Seattle, Wash.). The inclusion of cleavable linker sequences such as those specific for Factor XA or enterokinase (Invitrogen. San Diego, Calif.) between the purification domain and the encoded polypeptide may be used to facilitate purification. One such expression vector provides for expression of a fusion protein containing a polypeptide of interest and a nucleic acid encoding 6 histidine residues preceding a thioredoxin or an enterokinase cleavage site. The histidine residues facilitate purification on IMIAC (immobilized metal ion affinity chromatography) as described in Porath, J. et al. (1992, Prot. Exp. Purif. 3:263-281) while the enterokinase cleavage site provides a means for purifying the desired polypeptide from the fusion protein. A discussion of vectors which contain fusion proteins is provided in Kroll, D. J. et al. (1993; DNA Cell Biol. 12:441-453).

[1879] In addition to recombinant production methods, polypeptides of the invention, and fragments thereof, may be produced by direct peptide synthesis using solid-phase techniques (Merrifield J. (1963) J. Am. Chem. Soc. 85:2149-2154). Protein synthesis may be performed using manual techniques or by automation. Automated synthesis may be achieved, for example, using Applied Biosystems 431A Peptide Synthesizer (Perkin Elmer). Alternatively, various fragments may be chemically synthesized separately and combined using chemical methods to produce the full length molecule.

[1880] Antibody Compositions, Fragments Thereof and Other Binding Agents

[1881] According to another aspect, the present invention further provides binding agents, such as antibodies and antigen-binding fragments thereof, that exhibit immunological binding to a tumor polypeptide disclosed herein, or to a portion, variant or derivative thereof. An antibody, or antigen-binding fragment thereof, is said to “specifically bind,” “immunogically bind,” and/or is “immunologically reactive” to a polypeptide of the invention if it reacts at a detectable level (within, for example, an ELISA assay) with the polypeptide, and does not react detectably with unrelated polypeptides under similar conditions.

[1882] Immunological binding, as used in this context, generally refers to the non-covalent interactions of the type which occur between an immunoglobulin molecule and an antigen for which the immunoglobulin is specific. The strength, or affinity of immunological binding interactions can be expressed in terms of the dissociation constant (K_{d}) of the interaction, wherein a smaller K_{d} represents a greater affinity. Immunological binding properties of selected polypeptides can be quantified using methods well known in the art. One such method entails measuring the rates of antigen-binding site/antigen complex formation and dissociation, wherein those rates depend on the concentrations of the complex partners, the affinity of the interaction, and on geometric parameters that equally influence the rate in both directions. Thus, both the “on rate constant” (Kₒₙ) and the “off rate constant” (K_{off}) can be determined by calculation of the concentrations and the actual rates of association and dissociation. The ratio of K_{off} /Kₒₙ enables cancellation of all parameters not related to affinity, and is thus equal to the dissociation constant Kd. See, generally, Davies et al. (1990) Annual Rev. Biochem. 59:439-473.

[1883] An “antigen-binding site,” or “binding portion” of an antibody refers to the part of the immunoglobulin molecule that participates in antigen binding. The antigen binding site is formed by amino acid residues of the N-terminal variable (“V”) regions of the heavy (“H”) and light (“L”) chains. Three highly divergent stretches within the V regions of the heavy and light chains are referred to as “hypervariable regions” which are interposed between more conserved flanking stretches known as “framework regions,” or “FRs”. Thus the term “FR” refers to amino acid sequences which are naturally found between and adjacent to hypervariable regions in immunoglobulins. In an antibody molecule, the three hypervariable regions of a light chain and the three hypervariable regions of a heavy chain are disposed relative to each other in three dimensional space to form an antigen-binding surface. The antigen-binding surface is complementary to the three-dimensional surface of a bound antigen, and the three hypervariable regions of each of the heavy and light chains are referred to as “complementarity-determining regions,” or “CDRs.”

[1884] Binding agents may be further capable of differentiating between patients with and without a cancer, such as kidney cancer, using the representative assays provided herein. For example, antibodies or other binding agents that bind to a tumor protein will preferably generate a signal indicating the presence of a cancer in at least about 20% of patients with the disease, more preferably at least about 30% of patients. Alternatively, or in addition, the antibody will generate a negative signal indicating the absence of the disease in at least about 90% of individuals without the cancer. To determine whether a binding agent satisfies this requirement, biological samples (e.g., blood, sera, sputum, urine and/or tumor biopsies) from patients with and without a cancer (as determined using standard clinical tests) may be assayed as described herein for the presence of polypeptides that bind to the binding agent. Preferably, a statistically significant number of samples with and without the disease will be assayed. Each binding agent should satisfy the above criteria; however, those of ordinary skill in the art will recognize that binding agents may be used in combination to improve sensitivity.

[1885] Any agent that satisfies the above requirements may be a binding agent. For example, a binding agent may be a ribosome, with or without a peptide component, an RNA molecule or a polypeptide. In a preferred embodiment, a binding agent is an antibody or an antigen-binding fragment thereof. Antibodies may be prepared by any of a variety of techniques known to those of ordinary skill in the art. See, e.g., Harlow and Lane, Antibodies: A Laboratory Manual, Cold Spring Harbor Laboratory, 1988. In general, antibodies can be produced by cell culture techniques, including the generation of monoclonal antibodies as described herein, or via transfection of antibody genes into suitable bacterial or mammalian cell hosts, in order to allow for the production of recombinant antibodies. In one technique, an immunogen comprising the polypeptide is initially injected into any of a wide variety of mammals (e.g., mice, rats, rabbits, sheep or goats). In this step, the polypeptides of this invention may serve as the immunogen without modification. Alternatively, particularly for relatively short polypeptides, a superior immune response may be elicited if the polypeptide is joined to a carrier protein, such as bovine serum albumin or keyhole limpet hemocyanin. The immunogen is injected into the animal host, preferably according to a predetermined schedule incorporating one or more booster immunizations, and the animals are bled periodically. Polyclonal antibodies specific for the polypeptide may then be purified from such antisera by, for example, affinity chromatography using the polypeptide coupled to a suitable solid support.

[1886] Monoclonal antibodies specific for an antigenic polypeptide of interest may be prepared, for example, using the technique of Kohler and Milstein, Eur. J. Immunol 6:511-519, 1976, and improvements thereto. Briefly, these methods involve the preparation of immortal cell lines capable of producing antibodies having the desired specificity (i.e., reactivity with the polypeptide of interest). Such cell lines may be produced, for example, from spleen cells obtained from an animal immunized as described above. The spleen cells are then immortalized by, for example, fusion with a myeloma cell fusion partner, preferably one that is syngeneic with the immunized animal. A variety of fusion techniques may be employed. For example, the spleen cells and myeloma cells may be combined with a nonionic detergent for a few minutes and then plated at low density on a selective medium that supports the growth of hybrid cells, but not myeloma cells. A preferred selection technique uses HAT (hypoxanthine, aminopterin, thymidine) selection. After a sufficient time, usually about 1 to 2 weeks, colonies of hybrids are observed. Single colonies are selected and their culture supernatants tested for binding activity against the polypeptide. Hybridomas having high reactivity and specificity are preferred.

[1887] Monoclonal antibodies may be isolated from the supernatants of growing hybridoma colonies. In addition, various techniques may be employed to enhance the yield, such as injection of the hybridoma cell line into the peritoneal cavity of a suitable vertebrate host, such as a mouse. Monoclonal antibodies may then be harvested from the ascites fluid or the blood. Contaminants may be removed from the antibodies by conventional techniques, such as chromatography, gel filtration, precipitation, and extraction. The polypeptides of this invention may be used in the purification process in, for example, an affinity chromatography step.

[1888] A number of therapeutically useful molecules are known in the art which comprise antigen-binding sites that are capable of exhibiting immunological binding properties of an antibody molecule. The proteolytic enzyme papain preferentially cleaves IgG molecules to yield several fragments, two of which (the “F(ab)” fragments) each comprise a covalent heterodimer that includes an intact antigen-binding site. The enzyme pepsin is able to cleave IgG molecules to provide several fragments, including the “F(ab′)₂ ” fragment which comprises both antigen-binding sites. An “Fv” fragment can be produced by preferential proteolytic cleavage of an IgM, and on rare occasions IgG or IgA immunoglobulin molecule. Fv fragments are, however, more commonly derived using recombinant techniques known in the art. The Fv fragment includes a non-covalent V_{H}::V_{L} heterodimer including an antigen-binding site which retains much of the antigen recognition and binding capabilities of the native antibody molecule. Inbar et al. (1972) Proc. Nat. Acad. Sci. USA 69:2659-2662; Hochman et al. (1976) Biochem 15:2706-2710; and Ehrlich et al. (1980) Biochem 19:4091-4096.

[1889] A single chain Fv (“sFv”) polypeptide is a covalently linked V_{H}::V_{L} heterodimer which is expressed from a gene fusion including V_{H}- and V_{L}-encoding genes linked by a peptide-encoding linker. Huston et al. (1988) Proc. Nat. Acad. Sci. USA 85(16):5879-5883. A number of methods have been described to discern chemical structures for converting the naturally aggregated—but chemically separated—light and heavy polypeptide chains from an antibody V region into an sFv molecule which will fold into a three dimensional structure substantially similar to the structure of an antigen-binding site. See, e.g., U.S. Pat. Nos. 5,091,513 and 5,132,405, to Huston et al.; and U.S. Pat. No. 4,946,778, to Ladner et al.

[1890] Each of the above-described molecules includes a heavy chain and a light chain CDR set, respectively interposed between a heavy chain and a light chain FR set which provide support to the CDRS and define the spatial relationship of the CDRs relative to each other. As used herein, the term “CDR set” refers to the three hypervariable regions of a heavy or light chain V region. Proceeding from the N-terminus of a heavy or light chain, these regions are denoted as “CDR1,” “CDR2,” and “CDR3” respectively. An antigen-binding site, therefore, includes six CDRs, comprising the CDR set from each of a heavy and a light chain V region. A polypeptide comprising a single CDR, (e.g., a CDR1, CDR2 or CDR3) is referred to herein as a “molecular recognition unit.” Crystallographic analysis of a number of antigen-antibody complexes has demonstrated that the amino acid residues of CDRs form extensive contact with bound antigen, wherein the most extensive antigen contact is with the heavy chain CDR3. Thus, the molecular recognition units are primarily responsible for the specificity of an antigen-binding site.

[1891] As used herein, the term “FR set” refers to the four flanking amino acid sequences which frame the CDRs of a CDR set of a heavy or light chain V region. Some FR residues may contact bound antigen; however, FRs are primarily responsible for folding the V region into the antigen-binding site, particularly the FR residues directly adjacent to the CDRS. Within FRs, certain amino residues and certain structural features are very highly conserved. In this regard, all V region sequences contain an internal disulfide loop of around 90 amino acid residues. When the V regions fold into a binding-site, the CDRs are displayed as projecting loop motifs which form an antigen-binding surface. It is generally recognized that there are conserved structural regions of FRs which influence the folded shape of the CDR loops into certain “canonical” structures—regardless of the precise CDR amino acid sequence. Further, certain FR residues are known to participate in non-covalent interdomain contacts which stabilize the interaction of the antibody heavy and light chains.

[1892] A number of “humanized” antibody molecules comprising an antigen-binding site derived from a non-human immunoglobulin have been described, including chimeric antibodies having rodent V regions and their associated CDRs fused to human constant domains (Winter et al. (1991) Nature 349:293-299;

[1893] Lobuglio et al. (1989) Proc. Nat. Acad. Sci. USA 86:4220-4224; Shaw et al. (1987) J. Immunol. 138:4534-4538; and Brown et al. (1987) Cancer Res. 47:3577-3583), rodent CDRs grafted into a human supporting FR prior to fusion with an appropriate human antibody constant domain (Riechmann et al. (1988) Nature 332:323-327; Verhoeyen et al. (1988) Science 239:1534-1536; and Jones et al. (1986) Nature 321:522-525), and rodent CDRs supported by recombinantly veneered rodent FRs (European Patent Publication No. 519,596, published Dec. 23, 1992). These “humanized” molecules are designed to minimize unwanted immunological response toward rodent antihuman antibody molecules which limits the duration and effectiveness of therapeutic applications of those moieties in human recipients.

[1894] As used herein, the terms “veneered FRs” and “recombinantly veneered FRs” refer to the selective replacement of FR residues from, e.g., a rodent heavy or light chain V region, with human FR residues in order to provide a xenogeneic molecule comprising an antigen-binding site which retains substantially all of the native FR polypeptide folding structure. Veneering techniques are based on the understanding that the ligand binding characteristics of an antigen-binding site are determined primarily by the structure and relative disposition of the heavy and light chain CDR sets within the antigen-binding surface. Davies et al. (1990) Ann. Rev. Biochem. 59:439-473. Thus, antigen binding specificity can be preserved in a humanized antibody only wherein the CDR structures, their interaction with each other, and their interaction with the rest of the V region domains are carefully maintained. By using veneering techniques, exterior (e.g., solvent-accessible) FR residues which are readily encountered by the immune system are selectively replaced with human residues to provide a hybrid molecule that comprises either a weakly immunogenic, or substantially non-immunogenic veneered surface.

[1895] The process of veneering makes use of the available sequence data for human antibody variable domains compiled by Kabat et al., in Sequences of Proteins of Immunological Interest, 4th ed., (U.S. Dept. of Health and Human Services, U.S. Government Printing Office, 1987), updates to the Kabat database, and other accessible U.S. and foreign databases (both nucleic acid and protein). Solvent accessibilities of V region amino acids can be deduced from the known three-dimensional structure for human and murine antibody fragments. There are two general steps in veneering a murine antigen-binding site. Initially, the FRs of the variable domains of an antibody molecule of interest are compared with corresponding FR sequences of human variable domains obtained from the above-identified sources. The most homologous human V regions are then compared residue by residue to corresponding murine amino acids. The residues in the murine FR which differ from the human counterpart are replaced by the residues present in the human moiety using recombinant techniques well known in the art. Residue switching is only carried out with moieties which are at least partially exposed (solvent accessible), and care is exercised in the replacement of amino acid residues which may have a significant effect on the tertiary structure of V region domains, such as proline, glycine and charged amino acids.

[1896] In this manner, the resultant “veneered” murine antigen-binding sites are thus designed to retain the murine CDR residues, the residues substantially adjacent to the CDRs, the residues identified as buried or mostly buried (solvent inaccessible), the residues believed to participate in non-covalent (e.g., electrostatic and hydrophobic) contacts between heavy and light chain domains, and the residues from conserved structural regions of the FRs which are believed to influence the “canonical” tertiary structures of the CDR loops. These design criteria are then used to prepare recombinant nucleotide sequences which combine the CDRs of both the heavy and light chain of a murine antigen-binding site into human-appearing FRs that can be used to transfect mammalian cells for the expression of recombinant human antibodies which exhibit the antigen specificity of the murine antibody molecule.

[1897] In another embodiment of the invention, monoclonal antibodies of the present invention may be coupled to one or more therapeutic agents. Suitable agents in this regard include radionuclides, differentiation inducers, drugs, toxins, and derivatives thereof. Preferred radionuclides include ⁹⁰Y, ¹²³I, ¹²⁵I, ¹³¹I, ¹⁸⁶Re, ¹⁸⁸Re, ²¹¹At, and ²¹²Bi. Preferred drugs include methotrexate, and pyrimidine and purine analogs. Preferred differentiation inducers include phorbol esters and butyric acid. Preferred toxins include ricin, abrin, diptheria toxin, cholera toxin, gelonin, Pseudomonas exotoxin, Shigella toxin, and pokeweed antiviral protein.

[1898] A therapeutic agent may be coupled (e.g., covalently bonded) to a suitable monoclonal antibody either directly or indirectly (e.g., via a linker group). A direct reaction between an agent and an antibody is possible when each possesses a substituent capable of reacting with the other. For example, a nucleophilic group, such as an amino or sulfhydryl group, on one may be capable of reacting with a carbonyl-containing group, such as an anhydride or an acid halide, or with an alkyl group containing a good leaving group (e.g., a halide) on the other.

[1899] Alternatively, it may be desirable to couple a therapeutic agent and an antibody via a linker group. A linker group can function as a spacer to distance an antibody from an agent in order to avoid interference with binding capabilities. A linker group can also serve to increase the chemical reactivity of a substituent on an agent or an antibody, and thus increase the coupling efficiency. An increase in chemical reactivity may also facilitate the use of agents, or functional groups on agents, which otherwise would not be possible.

[1900] It will be evident to those skilled in the art that a variety of bifunctional or polyfunctional reagents, both homo- and hetero-functional (such as those described in the catalog of the Pierce Chemical Co., Rockford, Ill.), may be employed as the linker group. Coupling may be effected, for example, through amino groups, carboxyl groups, sulfhydryl groups or oxidized carbohydrate residues. There are numerous references describing such methodology, e.g., U.S. Pat. No. 4,671,958, to Rodwell et al.

[1901] Where a therapeutic agent is more potent when free from the antibody portion of the immunoconjugates of the present invention, it may be desirable to use a linker group which is cleavable during or upon internalization into a cell. A number of different cleavable linker groups have been described. The mechanisms for the intracellular release of an agent from these linker groups include cleavage by reduction of a disulfide bond (e.g., U.S. Pat. No. 4,489,710, to Spitler), by irradiation of a photolabile bond (e.g., U.S. Pat. No. 4,625,014, to Senter et al.), by hydrolysis of derivatized amino acid side chains (e.g., U.S. Pat. No. 4,638,045, to Kohn et al.), by serum complement-mediated hydrolysis (e.g., U.S. Pat. No. 4,671,958, to Rodwell et al.), and acid-catalyzed hydrolysis (e.g., U.S. Pat. No. 4,569,789, to Blattler et al.).

[1902] It may be desirable to couple more than one agent to an antibody. In one embodiment, multiple molecules of an agent are coupled to one antibody molecule. In another embodiment, more than one type of agent may be coupled to one antibody. Regardless of the particular embodiment, immunoconjugates with more than one agent may be prepared in a variety of ways. For example, more than one agent may be coupled directly to an antibody molecule, or linkers that provide multiple sites for attachment can be used. Alternatively, a carrier can be used.

[1903] A carrier may bear the agents in a variety of ways, including covalent bonding either directly or via a linker group. Suitable carriers include proteins such as albumins (e.g., U.S. Pat. No. 4,507,234, to Kato et al.), peptides and polysaccharides such as aminodextran (e.g., U.S. Pat. No. 4,699,784, to Shih et al.). A carrier may also bear an agent by noncovalent bonding or by encapsulation, such as within a liposome vesicle (e.g., U.S. Pat. Nos. 4,429,008 and 4,873,088). Carriers specific for radionuclide agents include radiohalogenated small molecules and chelating compounds. For example, U.S. Pat. No. 4,735,792 discloses representative radiohalogenated small molecules and their synthesis. A radionuclide chelate may be formed from chelating compounds that include those containing nitrogen and sulfur atoms as the donor atoms for binding the metal, or metal oxide, radionuclide. For example, U.S. Pat. No. 4,673,562, to Davison et al. discloses representative chelating compounds and their synthesis.

[1904] T Cell Compositions

[1905] The present invention, in another aspect, provides T cells specific for a tumor polypeptide disclosed herein, or for a variant or derivative thereof. Such cells may generally be prepared in vitro or ex vivo, using standard procedures. For example, T cells may be isolated from bone marrow, peripheral blood, or a fraction of bone marrow or peripheral blood of a patient, using a commercially available cell separation system, such as the Isolex™ System, available from Nexell Therapeutics, Inc. (Irvine, Calif.; see also U.S. Pat. No. 5,240,856; U.S. Pat. No. 5,215,926; WO 89/06280; WO 91/16116 and WO 92/07243). Alternatively, T cells may be derived from related or unrelated humans, non-human mammals, cell lines or cultures.

[1906] T cells may be stimulated with a polypeptide, polynucleotide encoding a polypeptide and/or an antigen presenting cell (APC) that expresses such a polypeptide. Such stimulation is performed under conditions and for a time sufficient to permit the generation of T cells that are specific for the polypeptide of interest. Preferably, a tumor polypeptide or polynucleotide of the invention is present within a delivery vehicle, such as a microsphere, to facilitate the generation of specific T cells.

[1907] T cells are considered to be specific for a polypeptide of the present invention if the T cells specifically proliferate, secrete cytokines or kill target cells coated with the polypeptide or expressing a gene encoding the polypeptide. T cell specificity may be evaluated using any of a variety of standard techniques. For example, within a chromium release assay or proliferation assay, a stimulation index of more than two fold increase in lysis and/or proliferation, compared to negative controls, indicates T cell specificity. Such assays may be performed, for example, as described in Chen et al., Cancer Res. 54:1065-1070, 1994. Alternatively, detection of the proliferation of T cells may be accomplished by a variety of known techniques. For example, T cell proliferation can be detected by measuring an increased rate of DNA synthesis (e.g., by pulse-labeling cultures of T cells with tritiated thymidine and measuring the amount of tritiated thymidine incorporated into DNA). Contact with a tumor polypeptide (100 ng/ml-100 μg/ml, preferably 200 ng/ml-25 μg/ml) for 3-7 days will typically result in at least a two fold increase in proliferation of the T cells. Contact as described above for 2-3 hours should result in activation of the T cells, as measured using standard cytokine assays in which a two fold increase in the level of cytokine release (e.g., TNF or IFN-γ) is indicative of T cell activation (see Coligan et al., Current Protocols in Immunology, vol. 1, Wiley Interscience (Greene 1998)). T cells that have been activated in response to a tumor polypeptide, polynucleotide or polypeptide-expressing APC may be CD4⁺ and/or CD8⁺. Tumor polypeptide-specific T cells may be expanded using standard techniques. Within preferred embodiments, the T cells are derived from a patient, a related donor or an unrelated donor, and are administered to the patient following stimulation and expansion.

[1908] For therapeutic purposes, CD4⁺ or CD8⁺T cells that proliferate in response to a tumor polypeptide, polynucleotide or APC can be expanded in number either in vitro or in vivo. Proliferation of such T cells in vitro may be accomplished in a variety of ways. For example, the T cells can be re-exposed to a tumor polypeptide, or a short peptide corresponding to an immunogenic portion of such a polypeptide, with or without the addition of T cell growth factors, such as interleukin-2, and/or stimulator cells that synthesize a tumor polypeptide. Alternatively, one or more T cells that proliferate in the presence of the tumor polypeptide can be expanded in number by cloning. Methods for cloning cells are well known in the art, and include limiting dilution.

[1909] T Cell Receptor Compositions

[1910] The T cell receptor (TCR) consists of 2 different, highly variable polypeptide chains, termed the T-cell receptor α and β chains, that are linked by a disulfide bond (Janeway, Travers, Walport. Immunobiology. Fourth Ed., 148-159. Elsevier Science Ltd/Garland Publishing. 1999). The α/β heterodimer complexes with the invariant CD3 chains at the cell membrane. This complex recognizes specific antigenic peptides bound to MHC molecules. The enormous diversity of TCR specificities is generated much like immunoglobulin diversity, through somatic gene rearrangement. The β chain genes contain over 50 variable (V), 2 diversity (D), over 10 joining (J) segments, and 2 constant region segments (C). The α chain genes contain over 70 V segments, and over 60 J segments but no D segments, as well as one C segment. During T cell development in the thymus, the D to J gene rearrangement of the β chain occurs, followed by the V gene segment rearrangement to the DJ. This functional VDJβ exon is transcribed and spliced to join to a Cβ. For the α chain, a Vα gene segment rearranges to a Jα gene segment to create the functional exon that is then transcribed and spliced to the Cα. Diversity is further increased during the recombination process by the random addition of P and N-nucleotides between the V, D, and J segments of the β chain and between the V and J segments in the □ chain (Janeway, Travers, Walport. Immunobiology. Fourth Ed., 98 and 150. Elsevier Science Ltd/Garland Publishing. 1999).

[1911] The present invention, in another aspect, provides TCRs specific for a polypeptide disclosed herein, or for a variant or derivative thereof. In accordance with the present invention, polynucleotide and amino acid sequences are provided for the V-J or V-D-J junctional regions or parts thereof for the alpha and beta chains of the T-cell receptor which recognize tumor polypeptides described herein. In general, this aspect of the invention relates to T-cell receptors which recognize or bind tumor polypeptides presented in the context of MHC. In a preferred embodiment the tumor antigens recognized by the T-cell receptors comprise a polypeptide of the present invention. For example, cDNA encoding a TCR specific for a kidney tumor peptide can be isolated from T cells specific for a tumor polypeptide using standard molecular biological and recombinant DNA techniques.

[1912] This invention further includes the T-cell receptors or analogs thereof having substantially the same function or activity as the T-cell receptors of this invention which recognize or bind tumor polypeptides. Such receptors include, but are not limited to, a fragment of the receptor, or a substitution, addition or deletion mutant of a T-cell receptor provided herein. This invention also encompasses polypeptides or peptides that are substantially homologous to the T-cell receptors provided herein or that retain substantially the same activity. The term “analog” includes any protein or polypeptide having an amino acid residue sequence substantially identical to the T-cell receptors provided herein in which one or more residues, preferably no more than 5 residues, more preferably no more than 25 residues have been conservatively substituted with a functionally similar residue and which displays the functional aspects of the T-cell receptor as described herein.

[1913] The present invention further provides for suitable mammalian host cells, for example, non-specific T cells, that are transfected with a polynucleotide encoding TCRs specific for a polypeptide described herein, thereby rendering the host cell specific for the polypeptide. The α and β chains of the TCR may be contained on separate expression vectors or alternatively, on a single expression vector that also contains an internal ribosome entry site (IRES) for cap-independent translation of the gene downstream of the IRES. Said host cells expressing TCRs specific for the polypeptide may be used, for example, for adoptive immunotherapy of kidney cancer as discussed further below.

[1914] In further aspects of the present invention, cloned TCRs specific for a polypeptide recited herein may be used in a kit for the diagnosis of kidney cancer. For example, the nucleic acid sequence or portions thereof, of tumor-specific TCRs can be used as probes or primers for the detection of expression of the rearranged genes encoding the specific TCR in a biological sample. Therefore, the present invention further provides for an assay for detecting messenger RNA or DNA encoding the TCR specific for a polypeptide.

[1915] Pharmaceutical Compositions

[1916] In additional embodiments, the present invention concerns formulation of one or more of the polynucleotide, polypeptide, T-cell, TCR, and/or antibody compositions disclosed herein in pharmaceutically-acceptable carriers for administration to a cell or an animal, either alone, or in combination with one or more other modalities of therapy.

[1917] It will be understood that, if desired, a composition as disclosed herein may be administered in combination with other agents as well, such as, e.g., other proteins or polypeptides or various pharmaceutically-active agents. In fact, there is virtually no limit to other components that may also be included, given that the additional agents do not cause a significant adverse effect upon contact with the target cells or host tissues. The compositions may thus be delivered along with various other agents as required in the particular instance. Such compositions may be purified from host cells or other biological sources, or alternatively may be chemically synthesized as described herein. Likewise, such compositions may further comprise substituted or derivatized RNA or DNA compositions.

[1918] Therefore, in another aspect of the present invention, pharmaceutical compositions are provided comprising one or more of the polynucleotide, polypeptide, antibody, TCR, and/or T-cell compositions described herein in combination with a physiologically acceptable carrier. In certain preferred embodiments, the pharmaceutical compositions of the invention comprise immunogenic polynucleotide and/or polypeptide compositions of the invention for use in prophylactic and theraputic vaccine applications. Vaccine preparation is generally described in, for example, M. F. Powell and M. J. Newman, eds., “Vaccine Design (the subunit and adjuvant approach),” Plenum Press (NY, 1995). Generally, such compositions will comprise one or more polynucleotide and/or polypeptide compositions of the present invention in combination with one or more immunostimulants.

[1919] It will be apparent that any of the pharmaceutical compositions described herein can contain pharmaceutically acceptable salts of the polynucleotides and polypeptides of the invention. Such salts can be prepared, for example, from pharmaceutically acceptable non-toxic bases, including organic bases (e.g., salts of primary, secondary and tertiary amines and basic amino acids) and inorganic bases (e.g., sodium, potassium, lithium, ammonium, calcium and magnesium salts).

[1920] In another embodiment, illustrative immunogenic compositions, e.g., vaccine compositions, of the present invention comprise DNA encoding one or more of the polypeptides as described above, such that the polypeptide is generated in situ. As noted above, the polynucleotide may be administered within any of a variety of delivery systems known to those of ordinary skill in the art. Indeed, numerous gene delivery techniques are well known in the art, such as those described by Rolland, Crit. Rev. Therap. Drug Carrier Systems 15:143-198, 1998, and references cited therein. Appropriate polynucleotide expression systems will, of course, contain the necessary regulatory DNA regulatory sequences for expression in a patient (such as a suitable promoter and terminating signal). Alternatively, bacterial delivery systems may involve the administration of a bacterium (such as Bacillus-Calmette-Guerrin) that expresses an immunogenic portion of the polypeptide on its cell surface or secretes such an epitope.

[1921] Therefore, in certain embodiments, polynucleotides encoding immunogenic polypeptides described herein are introduced into suitable mammalian host cells for expression using any of a number of known viral-based systems. In one illustrative embodiment, retroviruses provide a convenient and effective platform for gene delivery systems. A selected nucleotide sequence encoding a polypeptide of the present invention can be inserted into a vector and packaged in retroviral particles using techniques known in the art. The recombinant virus can then be isolated and delivered to a subject. A number of illustrative retroviral systems have been described (e.g., U.S. Pat. No. 5,219,740; Miller and Rosman (1989) BioTechniques 7:980-990; Miller, A. D. (1990) Human Gene Therapy 1:5-14; Scarpa et al. (1991) Virology 180:849-852; Burns et al. (1993) Proc. Natl. Acad. Sci. USA 90:8033-8037; and Boris-Lawrie and Temin (1993) Cur. Opin. Genet. Develop. 3:102-109.

[1922] In addition, a number of illustrative adenovirus-based systems have also been described. Unlike retroviruses which integrate into the host genome, adenoviruses persist extrachromosomally thus minimizing the risks associated with insertional mutagenesis (Haj-Ahmad and Graham (1986) J. Virol. 57:267-274; Bett et al. (1993) J. Virol. 67:5911-5921; Mittereder et al. (1994) Human Gene Therapy 5:717-729; Seth et al. (1994) J. Virol. 68:933-940; Barr et al. (1994) Gene Therapy 1:51-58; Berkner, K. L. (1988) BioTechniques 6:616-629; and Rich et al. (1993) Human Gene Therapy 4:461-476).

[1923] Various adeno-associated virus (MV) vector systems have also been developed for polynucleotide delivery. MV vectors can be readily constructed using techniques well known in the art. See, e.g., U.S. Pat. Nos. 5,173,414 and 5,139,941; International Publication Nos. WO 92/01070 and WO 93/03769; Lebkowski et al. (1988) Molec. Cell. Biol. 8:3988-3996; Vincent et al. (1990) Vaccines 90 (Cold Spring Harbor Laboratory Press); Carter, B. J. (1992) Current Opinion in Biotechnology 3:533-539; Muzyczka, N. (1992) Current Topics in Microbiol. and Immunol. 158:97-129; Kotin, R. M. (1994) Human Gene Therapy 5:793-801; Shelling and Smith (1994) Gene Therapy 1 :165-169; and Zhou et al. (1994) J. Exp. Med. 179:1867-1875.

[1924] Additional viral vectors useful for delivering the polynucleotides encoding polypeptides of the present invention by gene transfer include those derived from the pox family of viruses, such as vaccinia virus and avian poxyirus. By way of example, vaccinia virus recombinants expressing the novel molecules can be constructed as follows. The DNA encoding a polypeptide is first inserted into an appropriate vector so that it is adjacent to a vaccinia promoter and flanking vaccinia DNA sequences, such as the sequence encoding thymidine kinase (TK). This vector is then used to transfect cells which are simultaneously infected with vaccinia. Homologous recombination serves to insert the vaccinia promoter plus the gene encoding the polypeptide of interest into the viral genome. The resulting TK.sup.(−) recombinant can be selected by culturing the cells in the presence of 5-bromodeoxyuridine and picking viral plaques resistant thereto.

[1925] A vaccinia-based infection/transfection system can be conveniently used to provide for inducible, transient expression or coexpression of one or more polypeptides described herein in host cells of an organism. In this particular system, cells are first infected in vitro with a vaccinia virus recombinant that encodes the bacteriophage T7 RNA polymerase. This polymerase displays exquisite specificity in that it only transcribes templates bearing T7 promoters. Following infection, cells are transfected with the polynucleotide or polynucleotides of interest, driven by a T7 promoter. The polymerase expressed in the cytoplasm from the vaccinia virus recombinant transcribes the transfected DNA into RNA which is then translated into polypeptide by the host translational machinery. The method provides for high level, transient, cytoplasmic production of large quantities of RNA and its translation products. See, e.g., Elroy-Stein and Moss, Proc. Natl. Acad. Sci. USA (1990) 87:6743-6747; Fuerst et al. Proc. Natl. Acad. Sci. USA (1986) 83:8122-8126.

[1926] Alternatively, avipoxyiruses, such as the fowipox and canarypox viruses, can also be used to deliver the coding sequences of interest. Recombinant avipox viruses, expressing immunogens from mammalian pathogens, are known to confer protective immunity when administered to non-avian species. The use of an Avipox vector is particularly desirable in human and other mammalian species since members of the Avipox genus can only productively replicate in susceptible avian species and therefore are not infective in mammalian cells. Methods for producing recombinant Avipoxyiruses are known in the art and employ genetic recombination, as described above with respect to the production of vaccinia viruses. See, e.g., WO 91/12882; WO 89/03429; and WO 92/03545.

[1927] Any of a number of alphavirus vectors can also be used for delivery of polynucleotide compositions of the present invention, such as those vectors described in U.S. Pat. Nos. 5,843,723; 6,015,686; 6,008,035 and 6,015,694. Certain vectors based on Venezuelan Equine Encephalitis (VEE) can also be used, illustrative examples of which can be found in U.S. Pat. Nos. 5,505,947 and 5,643,576.

[1928] Moreover, molecular conjugate vectors, such as the adenovirus chimeric vectors described in Michael et al. J. Biol. Chem. (1993) 268:6866-6869 and Wagner et al. Proc. Natl. Acad. Sci. USA (1992) 89:6099-6103, can also be used for gene delivery under the invention.

[1929] Additional illustrative information on these and other known viral-based delivery systems can be found, for example, in Fisher-Hoch et al., Proc. Natl. Acad. Sci. USA 86:317-321, 1989; Flexner et al., Ann. N.Y. Acad. Sci. 569:86-103, 1989; Flexner et al., Vaccine 8:17-21, 1990; U.S. Pat. Nos. 4,603,112, 4,769,330, and 5,017,487; WO 89/01973; U.S. Pat. No. 4,777,127; GB 2,200,651; EP 0,345,242; WO 91/02805; Berkner, Biotechniques 6:616-627, 1988; Rosenfeld et al., Science 252:431-434, 1991; Kolls et al., Proc. Natl. Acad. Sci. USA 91:215-219, 1994; Kass-Eisler et al., Proc. Natl. Acad. Sci. USA 90:11498-11502, 1993; Guzman et al., Circulation 88:2838-2848, 1993; and Guzman et al., Cir. Res. 73:1202-1207, 1993.

[1930] In certain embodiments, a polynucleotide may be integrated into the genome of a target cell. This integration may be in the specific location and orientation via homologous recombination (gene replacement) or it may be integrated in a random, non-specific location (gene augmentation). In yet further embodiments, the polynucleotide may be stably maintained in the cell as a separate, episomal segment of DNA. Such polynucleotide segments or “episomes” encode sequences sufficient to permit maintenance and replication independent of or in synchronization with the host cell cycle. The manner in which the expression construct is delivered to a cell and where in the cell the polynucleotide remains is dependent on the type of expression construct employed.

[1931] In another embodiment of the invention, a polynucleotide is administered/delivered as “naked” DNA, for example as described in Ulmer et al., Science 259:1745-1749, 1993 and reviewed by Cohen, Science 259:1691-1692, 1993. The uptake of naked DNA may be increased by coating the DNA onto biodegradable beads, which are efficiently transported into the cells.

[1932] In still another embodiment, a composition of the present invention can be delivered via a particle bombardment approach, many of which have been described. In one illustrative example, gas-driven particle acceleration can be achieved with devices such as those manufactured by Powderject Pharmaceuticals PLC (Oxford, UK) and Powderject Vaccines Inc. (Madison, Wis.), some examples of which are described in U.S. Pat. Nos. 5,846,796; 6,010,478; 5,865,796; 5,584,807; and EP Patent No. 0500 799. This approach offers a needle-free delivery approach wherein a dry powder formulation of microscopic particles, such as polynucleotide or polypeptide particles, are accelerated to high speed within a helium gas jet generated by a hand held device, propelling the particles into a target tissue of interest.

[1933] In a related embodiment, other devices and methods that may be useful for gas-driven needle-less injection of compositions of the present invention include those provided by Bioject, Inc. (Portland, OR), some examples of which are described in U.S. Pat. Nos. 4,790,824; 5,064,413; 5,312,335; 5,383,851; 5,399,163; 5,520,639 and 5,993,412.

[1934] According to another embodiment, the pharmaceutical compositions described herein will comprise one or more immunostimulants in addition to the immunogenic polynucleotide, polypeptide, antibody, T-cell, TCR, and/or APC compositions of this invention. An immunostimulant refers to essentially any substance that enhances or potentiates an immune response (antibody and/or cell-mediated) to an exogenous antigen. One preferred type of immunostimulant comprises an adjuvant. Many adjuvants contain a substance designed to protect the antigen from rapid catabolism, such as aluminum hydroxide or mineral oil, and a stimulator of immune responses, such as lipid A, Bortadella pertussis or Mycobacterium tuberculosis derived proteins. Certain adjuvants are commercially available as, for example, Freund's Incomplete Adjuvant and Complete Adjuvant (Difco Laboratories, Detroit, Mich.); Merck Adjuvant 65 (Merck and Company, Inc., Rahway, N.J.); AS-2 (SmithKline Beecham, Philadelphia, Pa.); aluminum salts such as aluminum hydroxide gel (alum) or aluminum phosphate; salts of calcium, iron or zinc; an insoluble suspension of acylated tyrosine; acylated sugars; cationically or an ion ically derivatized polysaccharides; polyphosphazenes; biodegradable microspheres; monophosphoryl lipid A and quil A. Cytokines, such as GM-CSF, interleukin-2, -7, -12, and other like growth factors, may also be used as adjuvants.

[1935] Within certain embodiments of the invention, the adjuvant composition is preferably one that induces an immune response predominantly of the Th1 type. High levels of Th1-type cytokines (e.g., IFN-γ, TNFα, IL-2 and IL-12) tend to favor the induction of cell mediated immune responses to an administered antigen. In contrast, high levels of Th2-type cytokines (e.g., IL-4, IL-5, IL-6 and IL-10) tend to favor the induction of humoral immune responses. Following application of a vaccine as provided herein, a patient will support an immune response that includes Th1- and Th2-type responses. Within a preferred embodiment, in which a response is predominantly Th1-type, the level of Th1-type cytokines will increase to a greater extent than the level of Th2-type cytokines. The levels of these cytokines may be readily assessed using standard assays. For a review of the families of cytokines, see Mosmann and Coffman, Ann. Rev. Immunol. 7:145-173,1989.

[1936] Certain preferred adjuvants for eliciting a predominantly Th1-type response include, for example, a combination of monophosphoryl lipid A, preferably 3-de-O-acylated monophosphoryl lipid A, together with an aluminum salt. MPL® adjuvants are available from Corixa Corporation (Seattle, Wash.; see, for example, U.S. Pat. Nos. 4,436,727; 4,877,611; 4,866,034 and 4,912,094). CpG-containing oligonucleotides (in which the CpG dinucleotide is unmethylated) also induce a predominantly Th1 response. Such oligonucleotides are well known and are described, for example, in WO 96/02555, WO 99/33488 and U.S. Pat. Nos. 6,008,200 and 5,856,462. Immunostimulatory DNA sequences are also described, for example, by Sato et al., Science 273:352, 1996. Another preferred adjuvant comprises a saponin, such as Quil A, or derivatives thereof, including QS21 and QS7 (Aquila Biopharmaceuticals Inc., Framingham, Mass.); Escin; Digitonin; or Gypsophila or Chenopodium quinoa saponins. Other preferred formulations include more than one saponin in the adjuvant combinations of the present invention, for example combinations of at least two of the following group comprising QS21, QS7, Quil A, β-escin, or digitonin.

[1937] Alternatively the saponin formulations may be combined with vaccine vehicles composed of chitosan or other polycationic polymers, polylactide and polylactide-co-glycolide particles, poly-N-acetyl glucosamine-based polymer matrix, particles composed of polysaccharides or chemically modified polysaccharides, liposomes and lipid-based particles, particles composed of glycerol monoesters, etc. The saponins may also be formulated in the presence of cholesterol to form particulate structures such as liposomes or ISCOMs. Furthermore, the saponins may be formulated together with a polyoxyethylene ether or ester, in either a non-particulate solution or suspension, or in a particulate structure such as a paucilamelar liposome or ISCOM. The saponins may also be formulated with excipients such as Carbopol^{R} to increase viscosity, or may be formulated in a dry powder form with a powder excipient such as lactose.

[1938] In one preferred embodiment, the adjuvant system includes the combination of a monophosphoryl lipid A and a saponin derivative, such as the combination of QS21 and 3D-MPL® adjuvant, as described in WO 94/00153, or a less reactogenic composition where the QS21 is quenched with cholesterol, as described in WO 96/33739. Other preferred formulations comprise an oil-in-water emulsion and tocopherol. Another particularly preferred adjuvant formulation employing QS21, 3D-MPL! adjuvant and tocopherol in an oil-in-water emulsion is described in WO 95/17210.

[1939] Another enhanced adjuvant system involves the combination of a CpG-containing oligonucleotide and a saponin derivative particularly the combination of CpG and QS21 is disclosed in WO 00/09159. Preferably the formulation additionally comprises an oil in water emulsion and tocopherol.

[1940] Additional illustrative adjuvants for use in the pharmaceutical compositions of the invention include Montamide ISA 720 (Seppic, France), SAF (Chiron, California, United States), ISCOMS (CSL), MF-59 (Chiron), the SBAS series of adjuvants (e.g., SBAS-2 or SBAS-4, available from SmithKline Beecham, Rixensart, Belgium), Detox (Enhanzyn®) (Corixa, Hamilton, Mont.), RC-529 (Corixa, Hamilton, Mont.) and other aminoalkyl glucosaminide 4-phosphates (AGPs), such as those described in pending U.S. patent application Ser. Nos. 08/853,826 and 09/074,720, the disclosures of which are incorporated herein by reference in their entireties, and polyoxyethylene ether adjuvants such as those described in WO 99/52549A1.

[1941] Other preferred adjuvants include adjuvant molecules of the general formula

(I): HO(CH₂CH₂O)ₙ—A—R,

[1942] wherein, n is 1-50, A is a bond or —C(O)—, R is C₁₋₅₀ alkyl or Phenyl C₁₋₅₀ alkyl.

[1943] One embodiment of the present invention consists of a vaccine formulation comprising a polyoxyethylene ether of general formula (I), wherein n is between 1 and 50, preferably 4-24, most preferably 9; the R component is C₁₋₅₀, preferably C₄-C₂₀ alkyl and most preferably C₁₂ alkyl, and A is a bond. The concentration of the polyoxyethylene ethers should be in the range 0.1-20%, preferably from 0.1-10%, and most preferably in the range 0.1-1%. Preferred polyoxyethylene ethers are selected from the following group: polyoxyethylene-9-lauryl ether, polyoxyethylene-9-steoryl ether, polyoxyethylene-8-steoryl ether, polyoxyethylene-4-lauryl ether, polyoxyethylene-35-lauryl ether, and polyoxyethylene-23-lauryl ether. Polyoxyethylene ethers such as polyoxyethylene lauryl ether are described in the Merck index (12^{th} edition: entry 7717). These adjuvant molecules are described in WO 99/52549.

[1944] The polyoxyethylene ether according to the general formula (I) above may, if desired, be combined with another adjuvant. For example, a preferred adjuvant combination is preferably with CpG as described in the pending UK patent application GB 9820956.2.

[1945] According to another embodiment of this invention, an immunogenic composition described herein is delivered to a host via antigen presenting cells (APCs), such as dendritic cells, macrophages, B cells, monocytes and other cells that may be engineered to be efficient APCs. Such cells may, but need not, be genetically modified to increase the capacity for presenting the antigen, to improve activation and/or maintenance of the T cell response, to have anti-tumor effects per se and/or to be immunologically compatible with the receiver (i.e., matched HLA haplotype). APCs may generally be isolated from any of a variety of biological fluids and organs, including tumor and peritumoral tissues, and may be autologous, allogeneic, syngeneic or xenogeneic cells.

[1946] Certain preferred embodiments of the present invention use dendritic cells or progenitors thereof as antigen-presenting cells. Dendritic cells are highly potent APCs (Banchereau and Steinman, Nature 392:245-251,1998) and have been shown to be effective as a physiological adjuvant for eliciting prophylactic or therapeutic antitumor immunity (see Timmerman and Levy, Ann. Rev. Med. 50:507-529,1999). In general, dendritic cells may be identified based on their typical shape (stellate in situ, with marked cytoplasmic processes (dendrites) visible in vitro), their ability to take up, process and present antigens with high efficiency and their ability to activate naive T cell responses. Dendritic cells may, of course, be engineered to express specific cell-surface receptors or ligands that are not commonly found on dendritic cells in vivo or ex vivo, and such modified dendritic cells are contemplated by the present invention. As an alternative to dendritic cells, secreted vesicles antigen-loaded dendritic cells (called exosomes) may be used within a vaccine (see Zitvogel et al., Nature Med. 4:594-600,1998).

[1947] Dendritic cells and progenitors may be obtained from peripheral blood, bone marrow, tumor-infiltrating cells, peritumoral tissues-infiltrating cells, lymph nodes, spleen, skin, umbilical cord blood or any other suitable tissue or fluid. For example, dendritic cells may be differentiated ex vivo by adding a combination of cytokines such as GM-CSF, IL-4, IL-13 and/or TNFα to cultures of monocytes harvested from peripheral blood. Alternatively, CD34 positive cells harvested from peripheral blood, umbilical cord blood or bone marrow may be differentiated into dendritic cells by adding to the culture medium combinations of GM-CSF, IL-3, TNFα, CD40 ligand, LPS, flt3 ligand and/or other compound(s) that induce differentiation, maturation and proliferation of dendritic cells.

[1948] Dendritic cells are conveniently categorized as “immature” and “mature” cells, which allows a simple way to discriminate between two well characterized phenotypes. However, this nomenclature should not be construed to exclude all possible intermediate stages of differentiation. Immature dendritic cells are characterized as APC with a high capacity for antigen uptake and processing, which correlates with the high expression of Fcy receptor and mannose receptor. The mature phenotype is typically characterized by a lower expression of these markers, but a high expression of cell surface molecules responsible for T cell activation such as class I and class II MHC, adhesion molecules (e.g., CD54 and CD11) and costimulatory molecules (e.g., CD40, CD80, CD86 and 4-1BB).

[1949] APCs may generally be transfected with a polynucleotide of the invention (or portion or other variant thereof) such that the encoded polypeptide, or an immunogenic portion thereof, is expressed on the cell surface. Such transfection may take place ex vivo, and a pharmaceutical composition comprising such transfected cells may then be used for therapeutic purposes, as described herein. Alternatively, a gene delivery vehicle that targets a dendritic or other antigen presenting cell may be administered to a patient, resulting in transfection that occurs in vivo. In vivo and ex vivo transfection of dendritic cells, for example, may generally be performed using any methods known in the art, such as those described in WO 97/24447, or the gene gun approach described by Mahvi et al., Immunology and cell Biology 75:456-460,1997. Antigen loading of dendritic cells may be achieved by incubating dendritic cells or progenitor cells with the tumor polypeptide, DNA (naked or within a plasmid vector) or RNA; or with antigen-expressing recombinant bacterium or viruses (e.g., vaccinia, fowlpox, adenovirus or lentivirus vectors). Prior to loading, the polypeptide may be covalently conjugated to an immunological partner that provides T cell help (e.g., a carrier molecule). Alternatively, a dendritic cell may be pulsed with a non-conjugated immunological partner, separately or in the presence of the polypeptide. While any suitable carrier known to those of ordinary skill in the art may be employed in the pharmaceutical compositions of this invention, the type of carrier will typically vary depending on the mode of administration. Compositions of the present invention may be formulated for any appropriate manner of administration, including for example, topical, oral, nasal, mucosal, intravenous, intracranial, intraperitoneal, subcutaneous and intramuscular administration.

[1950] Carriers for use within such pharmaceutical compositions are biocompatible, and may also be biodegradable. In certain embodiments, the formulation preferably provides a relatively constant level of active component release. In other embodiments, however, a more rapid rate of release immediately upon administration may be desired. The formulation of such compositions is well within the level of ordinary skill in the art using known techniques. Illustrative carriers useful in this regard include microparticles of poly(lactide-co-glycolide), polyacrylate, latex, starch, cellulose, dextran and the like. Other illustrative delayed-release carriers include supramolecular biovectors, which comprise a non-liquid hydrophilic core (e.g., a cross-linked polysaccharide or oligosaccharide) and, optionally, an external layer comprising an amphiphilic compound, such as a phospholipid (see e.g., U.S. Pat. No. 5,151,254 and PCT applications WO 94/20078, WO/94/23701 and WO 96/06638). The amount of active compound contained within a sustained release formulation depends upon the site of implantation, the rate and expected duration of release and the nature of the condition to be treated or prevented.

[1951] In another illustrative embodiment, biodegradable microspheres (e.g., polylactate polyglycolate) are employed as carriers for the compositions of this invention. Suitable biodegradable microspheres are disclosed, for example, in U.S. Pat. Nos. 4,897,268; 5,075,109; 5,928,647; 5,811,128; 5,820,883; 5,853,763; 5,814,344, 5,407,609 and 5,942,252. Modified hepatitis B core protein carrier systems. such as described in WO/99 40934, and references cited therein, will also be useful for many applications. Another illustrative carrier/delivery system employs a carrier comprising particulate-protein complexes, such as those described in U.S. Pat. No. 5,928,647, which are capable of inducing a class I-restricted cytotoxic T lymphocyte responses in a host.

[1952] In another illustrative embodiment, calcium phosphate core particles are employed as carriers, vaccine adjuvants, or as controlled release matrices for the compositions of this invention. Exemplary calcium phosphate particles are disclosed, for example, in published patent application No. WO/0046147.

[1953] The pharmaceutical compositions of the invention will often further comprise one or more buffers (e.g., neutral buffered saline or phosphate buffered saline), carbohydrates (e.g., glucose, mannose, sucrose or dextrans), mannitol, proteins, polypeptides or amino acids such as glycine, antioxidants, bacteriostats, chelating agents such as EDTA or glutathione, adjuvants (e.g., aluminum hydroxide), solutes that render the formulation isotonic, hypotonic or weakly hypertonic with the blood of a recipient, suspending agents, thickening agents and/or preservatives. Alternatively, compositions of the present invention may be formulated as a lyophilizate.

[1954] The pharmaceutical compositions described herein may be presented in unit-dose or multi-dose containers, such as sealed ampoules or vials. Such containers are typically sealed in such a way to preserve the sterility and stability of the formulation until use. In general, formulations may be stored as suspensions, solutions or emulsions in oily or aqueous vehicles. Alternatively, a pharmaceutical composition may be stored in a freeze-dried condition requiring only the addition of a sterile liquid carrier immediately prior to use.

[1955] The development of suitable dosing and treatment regimens for using the particular compositions described herein in a variety of treatment regimens, including e.g., oral, parenteral, intravenous, intranasal, and intramuscular administration and formulation, is well known in the art, some of which are briefly discussed below for general purposes of illustration.

[1956] In certain applications, the pharmaceutical compositions disclosed herein may be delivered via oral administration to an animal. As such, these compositions may be formulated with an inert diluent or with an assimilable edible carrier, or they may be enclosed in hard- or soft-shell gelatin capsule, or they may be compressed into tablets, or they may be incorporated directly with the food of the diet.

[1957] The active compounds may even be incorporated with excipients and used in the form of ingestible tablets, buccal tables, troches, capsules, elixirs, suspensions, syrups, wafers, and the like (see, for example, Mathiowitz et al., Nature Mar. 27, 1997;386(6623):410-4; Hwang et al., Crit Rev Ther Drug Carrier Syst 1998;15(3):243-84; U.S. Pat. No. 5,641,515; U.S. Pat. No. 5,580,579 and U.S. Pat. No. 5,792,451). Tablets, troches, pills, capsules and the like may also contain any of a variety of additional components, for example, a binder, such as gum tragacanth, acacia, cornstarch, or gelatin; excipients, such as dicalcium phosphate; a disintegrating agent, such as corn starch, potato starch, alginic acid and the like; a lubricant, such as magnesium stearate; and a sweetening agent, such as sucrose, lactose or saccharin may be added or a flavoring agent, such as peppermint, oil of wintergreen, or cherry flavoring. When the dosage unit form is a capsule, it may contain, in addition to materials of the above type, a liquid carrier. Various other materials may be present as coatings or to otherwise modify the physical form of the dosage unit. For instance, tablets, pills, or capsules may be coated with shellac, sugar, or both. Of course, any material used in preparing any dosage unit form should be pharmaceutically pure and substantially non-toxic in the amounts employed. In addition, the active compounds may be incorporated into sustained-release preparation and formulations.

[1958] Typically, these formulations will contain at least about 0.1% of the active compound or more, although the percentage of the active ingredient(s) may, of course, be varied and may conveniently be between about 1 or 2% and about 60% or 70% or more of the weight or volume of the total formulation. Naturally, the amount of active compound(s) in each therapeutically useful composition may be prepared is such a way that a suitable dosage will be obtained in any given unit dose of the compound. Factors such as solubility, bioavailability, biological half-life, route of administration, product shelf life, as well as other pharmacological considerations will be contemplated by one skilled in the art of preparing such pharmaceutical formulations, and as such, a variety of dosages and treatment regimens may be desirable.

[1959] For oral administration the compositions of the present invention may alternatively be incorporated with one or more excipients in the form of a mouthwash, dentifrice, buccal tablet, oral spray, or sublingual orally-administered formulation. Alternatively, the active ingredient may be incorporated into an oral solution such as one containing sodium borate, glycerin and potassium bicarbonate, or dispersed in a dentifrice, or added in a therapeutically-effective amount to a composition that may include water, binders, abrasives, flavoring agents, foaming agents, and humectants. Alternatively the compositions may be fashioned into a tablet or solution form that may be placed under the tongue or otherwise dissolved in the mouth.

[1960] In certain circumstances it will be desirable to deliver the pharmaceutical compositions disclosed herein parenterally, intravenously, intramuscularly, or even intraperitoneally. Such approaches are well known to the skilled artisan, some of which are further described, for example, in U.S. Pat. Nos. 5,543,158; 5,641,515 and 5,399,363. In certain embodiments, solutions of the active compounds as free base or pharmacologically acceptable salts may be prepared in water suitably mixed with a surfactant, such as hydroxypropylcellulose. Dispersions may also be prepared in glycerol, liquid polyethylene glycols, and mixtures thereof and in oils. Under ordinary conditions of storage and use, these preparations generally will contain a preservative to prevent the growth of microorganisms.

[1961] Illustrative pharmaceutical forms suitable for injectable use include sterile aqueous solutions or dispersions and sterile powders for the extemporaneous preparation of sterile injectable solutions or dispersions (for example, see U.S. Pat. No. 5,466,468). In all cases the form must be sterile and must be fluid to the extent that easy syringability exists. It must be stable under the conditions of manufacture and storage and must be preserved against the contaminating action of microorganisms, such as bacteria and fungi. The carrier can be a solvent or dispersion medium containing, for example, water, ethanol, polyol (e.g., glycerol, propylene glycol, and liquid polyethylene glycol, and the like), suitable mixtures thereof, and/or vegetable oils. Proper fluidity may be maintained, for example, by the use of a coating, such as lecithin, by the maintenance of the required particle size in the case of dispersion and/or by the use of surfactants. The prevention of the action of microorganisms can be facilitated by various antibacterial and antifungal agents, for example, parabens, chlorobutanol, phenol, sorbic acid, thimerosal, and the like. In many cases, it will be preferable to include isotonic agents, for example, sugars or sodium chloride. Prolonged absorption of the injectable compositions can be brought about by the use in the compositions of agents delaying absorption, for example, aluminum monostearate and gelatin.

[1962] In one embodiment, for parenteral administration in an aqueous solution, the solution should be suitably buffered if necessary and the liquid diluent first rendered isotonic with sufficient saline or glucose. These particular aqueous solutions are especially suitable for intravenous, intramuscular, subcutaneous and intraperitoneal administration. In this connection, a sterile aqueous medium that can be employed will be known to those of skill in the art in light of the present disclosure. For example, one dosage may be dissolved in 1 ml of isotonic NaCl solution and either added to 1000 ml of hypodermoclysis fluid or injected at the proposed site of infusion, (see for example, “Remington's Pharmaceutical Sciences” 15th Edition, pages 1035-1038 and 1570-1580). Some variation in dosage will necessarily occur depending on the condition of the subject being treated. Moreover, for human administration, preparations will of course preferably meet sterility, pyrogenicity, and the general safety and purity standards as required by FDA Office of Biologics standards.

[1963] In another embodiment of the invention, the compositions disclosed herein may be formulated in a neutral or salt form. Illustrative pharmaceutically-acceptable salts include the acid addition salts (formed with the free amino groups of the protein) and which are formed with inorganic acids such as, for example, hydrochloric or phosphoric acids, or such organic acids as acetic, oxalic, tartaric, mandelic, and the like. Salts formed with the free carboxyl groups can also be derived from inorganic bases such as, for example, sodium, potassium, ammonium, calcium, or ferric hydroxides, and such organic bases as isopropylamine, trimethylamine, histidine, procaine and the like. Upon formulation, solutions will be administered in a manner compatible with the dosage formulation and in such amount as is therapeutically effective.

[1964] The carriers can further comprise any and all solvents, dispersion media, vehicles, coatings, diluents, antibacterial and antifungal agents, isotonic and absorption delaying agents, buffers, carrier solutions, suspensions, colloids, and the like. The use of such media and agents for pharmaceutical active substances is well known in the art. Except insofar as any conventional media or agent is incompatible with the active ingredient, its use in the therapeutic compositions is contemplated. Supplementary active ingredients can also be incorporated into the compositions. The phrase “pharmaceutically-acceptable” refers to molecular entities and compositions that do not produce an allergic or similar untoward reaction when administered to a human.

[1965] In certain embodiments, the pharmaceutical compositions may be delivered by intranasal sprays, inhalation, and/or other aerosol delivery vehicles. Methods for delivering genes, nucleic acids, and peptide compositions directly to the lungs via nasal aerosol sprays has been described, e.g., in U.S. Pat. No. 5,756,353 and U.S. Pat. No. 5,804,212. Likewise, the delivery of drugs using intranasal microparticle resins (Takenaga et al., J Controlled Release Mar. 2, 1998;52(1-2):81-7) and lysophosphatidyl-glycerol compounds (U.S. Pat. No. 5,725,871) are also well-known in the pharmaceutical arts. Likewise, illustrative transmucosal drug delivery in the form of a polytetrafluoroetheylene support matrix is described in U.S. Pat. No. 5,780,045.

[1966] In certain embodiments, liposomes, nanocapsules, microparticles, lipid particles, vesicles, and the like, are used for the introduction of the compositions of the present invention into suitable host cells/organisms. In particular, the compositions of the present invention may be formulated for delivery either encapsulated in a lipid particle, a liposome, a vesicle, a nanosphere, or a nanoparticle or the like. Alternatively, compositions of the present invention can be bound, either covalently or non-covalently, to the surface of such carrier vehicles.

[1967] The formation and use of liposome and liposome-like preparations as potential drug carriers is generally known to those of skill in the art (see for example, Lasic, Trends Biotechnol 1998 July;16(7):307-21; Takakura, Nippon Rinsho 1998 March;56(3):691-5; Chandran et al., Indian J Exp Biol. 1997 August;35(8):801-9; Margalit, Crit Rev Ther Drug Carrier Syst. 1995;12(2-3):233-61; U.S. Pat. Nos. 5,567,434; 5,552,157; 5,565,213; 5,738,868 and 5,795,587, each specifically incorporated herein by reference in its entirety).

[1968] Liposomes have been used successfully with a number of cell types that are normally difficult to transfect by other procedures, including T cell suspensions, primary hepatocyte cultures and PC 12 cells (Renneisen et al., J. Biol. Chem. Sep. 25, 1990;265(27):16337-42; Muller et al., DNA Cell Biol. 1990 April;9(3):221-9). In addition, liposomes are free of the DNA length constraints that are typical of viral-based delivery systems. Liposomes have been used effectively to introduce genes, various drugs, radiotherapeutic agents, enzymes, viruses, transcription factors, allosteric effectors and the like, into a variety of cultured cell lines and animals. Furthermore, he use of liposomes does not appear to be associated with autoimmune responses or unacceptable toxicity after systemic delivery.

[1969] In certain embodiments, liposomes are formed from phospholipids that are dispersed in an aqueous medium and spontaneously form multilamellar concentric bilayer vesicles (also termed multilamellar vesicles (MLVs).

[1970] Alternatively, in other embodiments, the invention provides for pharmaceutically-acceptable nanocapsule formulations of the compositions of the present invention. Nanocapsules can generally entrap compounds in a stable and reproducible way (see, for example, Quintanar-Guerrero et al., Drug Dev Ind Pharm. 1998 December;24(12):1113-28). To avoid side effects due to intracellular polymeric overloading, such ultrafine particles (sized around 0.1 μm) may be designed using polymers able to be degraded in vivo. Such particles can be made as described, for example, by Couvreur et al., Crit Rev Ther Drug Carrier Syst. 1988;5(1):1-20; zur Muhlen et al., Eur J Pharm Biopharm. 1998 March;45(2):149-55; Zambaux et al. J Controlled Release. Jan. 2, 1998;50(1-3):31-40; and U.S. Pat. No. 5,145,684.

[1971] Cancer Therapeutic Methods

[1972] Immunologic approaches to cancer therapy are based on the recognition that cancer cells can often evade the body's defenses against aberrant or foreign cells and molecules, and that these defenses might be therapeutically stimulated to regain the lost ground, e.g. pgs. 623-648 in Klein, Immunology (Wiley-Interscience, New York, 1982). Numerous recent observations that various immune effectors can directly or indirectly inhibit growth of tumors has led to renewed interest in this approach to cancer therapy, e.g. Jager, et al., Oncology 2001;60(1):1-7; Renner, et al., Ann Hematol 2000 December;79(12):651-9.

[1973] Four-basic cell types whose function has been associated with antitumor cell immunity and the elimination of tumor cells from the body are: i) B-lymphocytes which secrete immunoglobulins into the blood plasma for identifying and labeling the nonself invader cells; ii) monocytes which secrete the complement proteins that are responsible for lysing and processing the immunoglobulin-coated target invader cells; iii) natural killer lymphocytes having two mechanisms for the destruction of tumor cells, antibody-dependent cellular cytotoxicity and natural killing; and iv) T-lymphocytes possessing antigen-specific receptors and having the capacity to recognize a tumor cell carrying complementary marker molecules (Schreiber, H., 1989, in Fundamental Immunology (ed). W. E. Paul, pp. 923-955).

[1974] Cancer immunotherapy generally focuses on inducing humoral immune responses, cellular immune responses, or both. Moreover, it is well established that induction of CD4⁺ T helper cells is necessary in order to secondarily induce either antibodies or cytotoxic CD8⁺ T cells. Polypeptide antigens that are selective or ideally specific for cancer cells, particularly kidney cancer cells, offer a powerful approach for inducing immune responses against kidney cancer, and are an important aspect of the present invention.

[1975] Therefore, in further aspects of the present invention, the pharmaceutical compositions described herein may be used to stimulate an immune response against cancer, particularly for the immunotherapy of kidney cancer. Within such methods, the pharmaceutical compositions described herein are administered to a patient, typically a warm-blooded animal, preferably a human. A patient may or may not be afflicted with cancer. Pharmaceutical compositions and vaccines may be administered either prior to or following surgical removal of primary tumors and/or treatment such as administration of radiotherapy or conventional chemotherapeutic drugs. As discussed above, administration of the pharmaceutical compositions may be by any suitable method, including administration by intravenous, intraperitoneal, intramuscular, subcutaneous, intranasal, intradermal, anal, vaginal, topical and oral routes.

[1976] Within certain embodiments, immunotherapy may be active immunotherapy, in which treatment relies on the in vivo stimulation of the endogenous host immune system to react against tumors with the administration of immune response-modifying agents (such as polypeptides and polynucleotides as provided herein).

[1977] Within other embodiments, immunotherapy may be passive immunotherapy, in which treatment involves the delivery of agents with established tumor-immune reactivity (such as effector cells or antibodies) that can directly or indirectly mediate antitumor effects and does not necessarily depend on an intact host immune system. Examples of effector cells include T cells as discussed above, T lymphocytes (such as CD8⁺ cytotoxic T lymphocytes and CD4⁺ T-helper tumor-infiltrating lymphocytes), killer cells (such as Natural Killer cells and lymphokine-activated killer cells), B cells and antigen-presenting cells (such as dendritic cells and macrophages) expressing a polypeptide provided herein. T cell receptors and antibody receptors specific for the polypeptides recited herein may be cloned, expressed and transferred into other vectors or effector cells for adoptive immunotherapy. The polypeptides provided herein may also be used to generate antibodies or anti-idiotypic antibodies (as described above and in U.S. Pat. No. 4,918,164) for passive immunotherapy.

[1978] Monoclonal antibodies may be labeled with any of a variety of labels for desired selective usages in detection, diagnostic assays or therapeutic applications (as described in U.S. Pat. Nos. 6,090,365; 6,015,542; 5,843,398; 5,595,721; and 4,708,930, hereby incorporated by reference in their entirety as if each was incorporated individually). In each case, the binding of the labelled monoclonal antibody to the determinant site of the antigen will signal detection or delivery of a particular therapeutic agent to the antigenic determinant on the non-normal cell. A further object of this invention is to provide the specific monoclonal antibody suitably labelled for achieving such desired selective usages thereof.

[1979] Effector cells may generally be obtained in sufficient quantities for adoptive immunotherapy by growth in vitro, as described herein. Culture conditions for expanding single antigen-specific effector cells to several billion in number with retention of antigen recognition in vivo are well known in the art. Such in vitro culture conditions typically use intermittent stimulation with antigen, often in the presence of cytokines (such as IL-2) and non-dividing feeder cells. As noted above, immunoreactive polypeptides as provided herein may be used to rapidly expand antigen-specific T cell cultures in order to generate a sufficient number of cells for immunotherapy. In particular, antigen-presenting cells, such as dendritic, macrophage, monocyte, fibroblast and/or B cells, may be pulsed with immunoreactive polypeptides or transfected with one or more polynucleotides using standard techniques well known in the art. For example, antigen-presenting cells can be transfected with a polynucleotide having a promoter appropriate for increasing expression in a recombinant virus or other expression system. Cultured effector cells for use in therapy must be able to grow and distribute widely, and to survive long term in vivo. Studies have shown that cultured effector cells can be induced to grow in vivo and to survive long term in substantial numbers by repeated stimulation with antigen supplemented with IL-2 (see, for example, Cheever et al., Immunological Reviews 157:177, 1997). Alternatively, a vector expressing a polypeptide recited herein may be introduced into antigen presenting cells taken from a patient and clonally propagated ex vivo for transplant back into the same patient. Transfected cells may be reintroduced into the patient using any means known in the art, preferably in sterile form by intravenous, intracavitary, intraperitoneal or intratumor administration.

[1980] Routes and frequency of administration of the therapeutic compositions described herein, as well as dosage, will vary from individual to individual, and may be readily established using standard techniques. In general, the pharmaceutical compositions and vaccines may be administered by injection (e.g., intracutaneous, intramuscular, intravenous or subcutaneous), intranasally (e.g., by aspiration) or orally. Preferably, between 1 and 10 doses may be administered over a 52 week period. Preferably, 6 doses are administered, at intervals of 1 month, and booster vaccinations may be given periodically thereafter. Alternate protocols may be appropriate for individual patients. A suitable dose is an amount of a compound that, when administered as described above, is capable of promoting an anti-tumor immune response, and is at least 10-50% above the basal (i.e., untreated) level. Such response can be monitored by measuring the anti-tumor antibodies in a patient or by vaccine-dependent generation of cytolytic effector cells capable of killing the patient's tumor cells in vitro. Such vaccines should also be capable of causing an immune response that leads to an improved clinical outcome (e.g., more frequent remissions, complete or partial or longer disease-free survival) in vaccinated patients as compared to non-vaccinated patients. In general, for pharmaceutical compositions and vaccines comprising one or more polypeptides, the amount of each polypeptide present in a dose ranges from about 25 μg to 5 mg per kg of host. Suitable dose sizes will vary with the size of the patient, but will typically range from about 0.1 mL to about 5 mL.

[1981] In general, an appropriate dosage and treatment regimen provides the active compound(s) in an amount sufficient to provide therapeutic and/or prophylactic benefit. Such a response can be monitored by establishing an improved clinical outcome (e.g., more frequent remissions, complete or partial, or longer disease-free survival) in treated patients as compared to non-treated patients. Increases in preexisting immune responses to a tumor protein generally correlate with an improved clinical outcome. Such immune responses may generally be evaluated using standard proliferation, cytotoxicity or cytokine assays, which may be performed using samples obtained from a patient before and after treatment.

[1982] Cancer Detection and Diagnostic Compositions, Methods and Kits

[1983] In general, a cancer may be detected in a patient based on the presence of one or more kidney tumor proteins and/or polynucleotides encoding such proteins in a biological sample (for example, blood, sera, sputum urine and/or tumor biopsies) obtained from the patient. In other words, such proteins may be used as markers to indicate the presence or absence of a cancer such as kidney cancer. In addition, such proteins may be useful for the detection of other cancers. The binding agents provided herein generally permit detection of the level of antigen that binds to the agent in the biological sample.

[1984] Polynucleotide primers and probes may be used to detect the level of mRNA encoding a tumor protein, which is also indicative of the presence or absence of a cancer. In general, a tumor sequence should be present at a level that is at least two-fold, preferably three-fold, and more preferably five-fold or higher in tumor tissue than in normal tissue of the same type from which the tumor arose. Expression levels of a particular tumor sequence in tissue types different from that in which the tumor arose are irrelevant in certain diagnostic embodiments since the presence of tumor cells can be confirmed by observation of predetermined differential expression levels, e.g., 2-fold, 5-fold, etc, in tumor tissue to expression levels in normal tissue of the same type.

[1985] Other differential expression patterns can be utilized advantageously for diagnostic purposes. For example, in one aspect of the invention, overexpression of a tumor sequence in tumor tissue and normal tissue of the same type, but not in other normal tissue types, e.g. PBMCs, can be exploited diagnostically. In this case, the presence of metastatic tumor cells, for example in a sample taken from the circulation or some other tissue site different from that in which the tumor arose, can be identified and/or confirmed by detecting expression of the tumor sequence in the sample, for example using RT-PCR analysis. In many instances, it will be desired to enrich for tumor cells in the sample of interest, e.g., PBMCs, using cell capture or other like techniques.

[1986] There are a variety of assay formats known to those of ordinary skill in the art for using a binding agent to detect polypeptide markers in a sample. See, e.g., Harlow and Lane, Antibodies: A Laboratory Manual, Cold Spring Harbor Laboratory, 1988. In general, the presence or absence of a cancer in a patient may be determined by (a) contacting a biological sample obtained from a patient with a binding agent; (b) detecting in the sample a level of polypeptide that binds to the binding agent; and (c) comparing the level of polypeptide with a predetermined cut-off value.

[1987] In a preferred embodiment, the assay involves the use of binding agent immobilized on a solid support to bind to and remove the polypeptide from the remainder of the sample. The bound polypeptide may then be detected using a detection reagent that contains a reporter group and specifically binds to the binding agent/polypeptide complex. Such detection reagents may comprise, for example, a binding agent that specifically binds to the polypeptide or an antibody or other agent that specifically binds to the binding agent, such as an anti-immunoglobulin, protein G, protein A or a lectin. Alternatively, a competitive assay may be utilized, in which a polypeptide is labeled with a reporter group and allowed to bind to the immobilized binding agent after incubation of the binding agent with the sample. The extent to which components of the sample inhibit the binding of the labeled polypeptide to the binding agent is indicative of the reactivity of the sample with the immobilized binding agent. Suitable polypeptides for use within such assays include full length kidney tumor proteins and polypeptide portions thereof to which the binding agent binds, as described above.

[1988] The solid support may be any material known to those of ordinary skill in the art to which the tumor protein may be attached. For example, the solid support may be a test well in a microtiter plate or a nitrocellulose or other suitable membrane. Alternatively, the support may be a bead or disc, such as glass, fiberglass, latex or a plastic material such as polystyrene or polyvinylchloride. The support may also be a magnetic particle or a fiber optic sensor, such as those disclosed, for example, in U.S. Pat. No. 5,359,681. The binding agent may be immobilized on the solid support using a variety of techniques known to those of skill in the art, which are amply described in the patent and scientific literature. In the context of the present invention, the term “immobilization” refers to both noncovalent association, such as adsorption, and covalent attachment (which may be a direct linkage between the agent and functional groups on the support or may be a linkage by way of a cross-linking agent). Immobilization by adsorption to a well in a microtiter plate or to a membrane is preferred. In such cases, adsorption may be achieved by contacting the binding agent, in a suitable buffer, with the solid support for a suitable amount of time. The contact time varies with temperature, but is typically between about 1 hour and about 1 day. In general, contacting a well of a plastic microtiter plate (such as polystyrene or polyvinylchloride) with an amount of binding agent ranging from about 10 ng to about 10 μg, and preferably about 100 ng to about 1 μg, is sufficient to immobilize an adequate amount of binding agent.

[1989] Covalent attachment of binding agent to a solid support may generally be achieved by first reacting the support with a bifunctional reagent that will react with both the support and a functional group, such as a hydroxyl or amino group, on the binding agent. For example, the binding agent may be covalently attached to supports having an appropriate polymer coating using benzoquinone or by condensation of an aldehyde group on the support with an amine and an active hydrogen on the binding partner (see, e.g., Pierce Immunotechnology Catalog and Handbook, 1991, at A12-A13).

[1990] In certain embodiments, the assay is a two-antibody sandwich assay. This assay may be performed by first contacting an antibody that has been immobilized on a solid support, commonly the well of a microtiter plate, with the sample, such that polypeptides within the sample are allowed to bind to the immobilized antibody. Unbound sample is then removed from the immobilized polypeptide-antibody complexes and a detection reagent (preferably a second antibody capable of binding to a different site on the polypeptide) containing a reporter group is added. The amount of detection reagent that remains bound to the solid support is then determined using a method appropriate for the specific reporter group.

[1991] More specifically, once the antibody is immobilized on the support as described above, the remaining protein binding sites on the support are typically blocked. Any suitable blocking agent known to those of ordinary skill in the art, such as bovine serum albumin or Tween™ (Sigma Chemical Co., St. Louis, Mo.). The immobilized antibody is then incubated with the sample, and polypeptide is allowed to bind to the antibody. The sample may be diluted with a suitable diluent, such as phosphate-buffered saline (PBS) prior to incubation. In general, an appropriate contact time (i.e., incubation time) is a period of time that is sufficient to detect the presence of polypeptide within a sample obtained from an individual with kidney least about 95% of that achieved at equilibrium between bound and unbound polypeptide. Those of ordinary skill in the art will recognize that the time necessary to achieve equilibrium may be readily determined by assaying the level of binding that occurs over a period of time. At room temperature, an incubation time of about 30 minutes is generally sufficient.

[1992] Unbound sample may then be removed by washing the solid support with an appropriate buffer, such as PBS containing 0.1% Tween 20™. The second antibody, which contains a reporter group, may then be added to the solid support. Preferred reporter groups include those groups recited above.

[1993] The detection reagent is then incubated with the immobilized antibody-polypeptide complex for an amount of time sufficient to detect the bound polypeptide. An appropriate amount of time may generally be determined by assaying the level of binding that occurs over a period of time. Unbound detection reagent is then removed and bound detection reagent is detected using the reporter group. The method employed for detecting the reporter group depends upon the nature of the reporter group. For radioactive groups, scintillation counting or autoradiographic methods are generally appropriate. Spectroscopic methods may be used to detect dyes, luminescent groups and fluorescent groups. Biotin may be detected using avidin, coupled to a different reporter group (commonly a radioactive or fluorescent group or an enzyme). Enzyme reporter groups may generally be detected by the addition of substrate (generally for a specific period of time), followed by spectroscopic or other analysis of the reaction products.

[1994] To determine the presence or absence of a cancer, such as kidney cancer, the signal detected from the reporter group that remains bound to the solid support is generally compared to a signal that corresponds to a predetermined cut-off value. In one preferred embodiment, the cut-off value for the detection of a cancer is the average mean signal obtained when the immobilized antibody is incubated with samples from patients without the cancer. In general, a sample generating a signal that is three standard deviations above the predetermined cut-off value is considered positive for the cancer. In an alternate preferred embodiment, the cut-off value is determined using a Receiver Operator Curve, according to the method of Sackett et al., Clinical Epidemiology: A Basic Science for Clinical Medicine, Little Brown and Co., 1985, p. 106-7. Briefly, in this embodiment, the cut-off value may be determined from a plot of pairs of true positive rates (i.e., sensitivity) and false positive rates (100%-specificity) that correspond to each possible cut-off value for the diagnostic test result. The cut-off value on the plot that is the closest to the upper left-hand corner (i.e., the value that encloses the largest area) is the most accurate cut-off value, and a sample generating a signal that is higher than the cut-off value determined by this method may be considered positive. Alternatively, the cut-off value may be shifted to the left along the plot, to minimize the false positive rate, or to the right, to minimize the false negative rate. In general, a sample generating a signal that is higher than the cut-off value determined by this method is considered positive for a cancer.

[1995] In a related embodiment, the assay is performed in a flow-through or strip test format, wherein the binding agent is immobilized on a membrane, such as nitrocellulose. In the flow-through test, polypeptides within the sample bind to the immobilized binding agent as the sample passes through the membrane. A second, labeled binding agent then binds to the binding agent-polypeptide complex as a solution containing the second binding agent flows through the membrane. The detection of bound second binding agent may then be performed as described above. In the strip test format, one end of the membrane to which binding agent is bound is immersed in a solution containing the sample. The sample migrates along the membrane through a region containing second binding agent and to the area of immobilized binding agent. Concentration of second binding agent at the area of immobilized antibody indicates the presence of a cancer. Typically, the concentration of second binding agent at that site generates a pattern, such as a line, that can be read visually. The absence of such a pattern indicates a negative result. In general, the amount of binding agent immobilized on the membrane is selected to generate a visually discernible pattern when the biological sample contains a level of polypeptide that would be sufficient to generate a positive signal in the two-antibody sandwich assay, in the format discussed above. Preferred binding agents for use in such assays are antibodies and antigen-binding fragments thereof. Preferably, the amount of antibody immobilized on the membrane ranges from about 25 ng to about 1 μg, and more preferably from about 50 ng to about 500 ng. Such tests can typically be performed with a very small amount of biological sample.

[1996] Of course, numerous other assay protocols exist that are suitable for use with the tumor proteins or binding agents of the present invention. The above descriptions are intended to be exemplary only. For example, it will be apparent to those of ordinary skill in the art that the above protocols may be readily modified to use tumor polypeptides to detect antibodies that bind to such polypeptides in a biological sample. The detection of such tumor protein specific antibodies may correlate with the presence of a cancer.

[1997] A cancer may also, or alternatively, be detected based on the presence of T cells that specifically react with a tumor protein in a biological sample. Within certain methods, a biological sample comprising CD4⁺ and/or CD8⁺ T cells isolated from a patient is incubated with a tumor polypeptide, a polynucleotide encoding such a polypeptide and/or an APC that expresses at least an immunogenic portion of such a polypeptide, and the presence or absence of specific activation of the T cells is detected. Suitable biological samples include, but are not limited to, isolated T cells. For example, T cells may be isolated from a patient by routine techniques (such as by Ficoll/Hypaque density gradient centrifugation of peripheral blood lymphocytes). T cells may be incubated in vitro for 2-9 days (typically 4 days) at 37° C. with polypeptide (e.g., 5-25 μg/ml). It may be desirable to incubate another aliquot of a T cell sample in the absence of tumor polypeptide to serve as a control. For CD4⁺ T cells, activation is preferably detected by evaluating proliferation of the T cells. For CD8⁺ T cells, activation is preferably detected by evaluating cytolytic activity. A level of proliferation that is at least two fold greater and/or a level of cytolytic activity that is at least 20% greater than in disease-free patients indicates the presence of a cancer in the patient.

[1998] As noted above, a cancer may also, or alternatively, be detected based on the level of mRNA encoding a tumor protein in a biological sample. For example, at least two oligonucleotide primers may be employed in a polymerase chain reaction (PCR) based assay to amplify a portion of a tumor cDNA derived from a biological sample, wherein at least one of the oligonucleotide primers is specific for (i.e., hybridizes to) a polynucleotide encoding the tumor protein. The amplified cDNA is then separated and detected using techniques well known in the art, such as gel electrophoresis.

[1999] Similarly, oligonucleotide probes that specifically hybridize to a polynucleotide encoding a tumor protein may be used in a hybridization assay to detect the presence of polynucleotide encoding the tumor protein in a biological sample.

[2000] To permit hybridization under assay conditions, oligonucleotide primers and probes should comprise an oligonucleotide sequence that has at least about 60%, preferably at least about 75% and more preferably at least about 90%, identity to a portion of a polynucleotide encoding a tumor protein of the invention that is at least 10 nucleotides, and preferably at least 20 nucleotides, in length. Preferably, oligonucleotide primers and/or probes hybridize to a polynucleotide encoding a polypeptide described herein under moderately stringent conditions, as defined above. Oligonucleotide primers and/or probes which may be usefully employed in the diagnostic methods described herein preferably are at least 10-40 nucleotides in length. In a preferred embodiment, the oligonucleotide primers comprise at least 10 contiguous nucleotides, more preferably at least 15 contiguous nucleotides, of a DNA molecule having a sequence as disclosed herein. Techniques for both PCR based assays and hybridization assays are well known in the art (see, for example, Mullis et al., Cold Spring Harbor Symp. Quant Biol., 51:263, 1987; Erlich ed., PCR Technology, Stockton Press, NY, 1989).

[2001] One preferred assay employs RT-PCR, in which PCR is applied in conjunction with reverse transcription. Typically, RNA is extracted from a biological sample, such as biopsy tissue, and is reverse transcribed to produce cDNA molecules. PCR amplification using at least one specific primer generates a cDNA molecule, which may be separated and visualized using, for example, gel electrophoresis. Amplification may be performed on biological samples taken from a test patient and from an individual who is not afflicted with a cancer. The amplification reaction may be performed on several dilutions of cDNA spanning two orders of magnitude. A two-fold or greater increase in expression in several dilutions of the test patient sample as compared to the same dilutions of the non-cancerous sample is typically considered positive.

[2002] In another aspect of the present invention, cell capture technologies may be used in conjunction, with, for example, real-time PCR to provide a more sensitive tool for detection of metastatic cells expressing kidney tumor antigens. Detection of kidney cancer cells in biological samples, e.g., bone marrow samples, peripheral blood, and small needle aspiration samples is desirable for diagnosis and prognosis in kidney cancer patients.

[2003] Immunomagnetic beads coated with specific monoclonal antibodies to surface cell markers, or tetrameric antibody complexes, may be used to first enrich or positively select cancer cells in a sample. Various commercially available kits may be used, including Dynabeads® Epithelial Enrich (Dynal Biotech, Oslo, Norway), StemSep™ (StemCell Technologies, Inc., Vancouver, BC), and RosetteSep (StemCell Technologies). A skilled artisan will recognize that other methodologies and kits may also be used to enrich or positively select desired cell populations. Dynabeads® Epithelial Enrich contains magnetic beads coated with mAbs specific for two glycoprotein membrane antigens expressed on normal and neoplastic epithelial tissues. The coated beads may be added to a sample and the sample then applied to a magnet, thereby capturing the cells bound to the beads. The unwanted cells are washed away and the magnetically isolated cells eluted from the beads and used in further analyses.

[2004] RosetteSep can be used to enrich cells directly from a blood sample and consists of a cocktail of tetrameric antibodies that targets a variety of unwanted cells and crosslinks them to glycophorin A on red blood cells (RBC) present in the sample, forming rosettes. When centrifuged over Ficoll, targeted cells pellet along with the free RBC. The combination of antibodies in the depletion cocktail determines which cells will be removed and consequently which cells will be recovered. Antibodies that are available include, but are not limited to: CD2, CD3, CD4, CD5, CD8, CD10, CD11b, CD14, CD15, CD16, CD19, CD20, CD24, CD25, CD29, CD33, CD34, CD36, CD38, CD41, CD45, CD45RA, CD45RO, CD56, CD66B, CD66e, HLA-DR, IgE, and TCRαβ.

[2005] Additionally, it is contemplated in the present invention that mAbs specific for kidney tumor antigens can be generated and used in a similar manner. For example, mAbs that bind to tumor-specific cell surface antigens may be conjugated to magnetic beads, or formulated in a tetrameric antibody complex, and used to enrich or positively select metastatic kidney tumor cells from a sample. Once a sample is enriched or positively selected, cells may be lysed and RNA isolated. RNA may then be subjected to RT-PCR analysis using kidney tumor-specific primers in a real-time PCR assay as described herein. One skilled in the art will recognize that enriched or selected populations of cells may be analyzed by other methods (e.g. in situ hybridization or flow cytometry).

[2006] In another embodiment, the compositions described herein may be used as markers for the progression of cancer. In this embodiment, assays as described above for the diagnosis of a cancer may be performed over time, and the change in the level of reactive polypeptide(s) or polynucleotide(s) evaluated. For example, the assays may be performed every 24-72 hours for a period of 6 months to 1 year, and thereafter performed as needed. In general, a cancer is progressing in those patients in whom the level of polypeptide or polynucleotide detected increases over time. In contrast, the cancer is not progressing when the level of reactive polypeptide or polynucleotide either remains constant or decreases with time.

[2007] Certain in vivo diagnostic assays may be performed directly on a tumor. One such assay involves contacting tumor cells with a binding agent. The bound binding agent may then be detected directly or indirectly via a reporter group. Such binding agents may also be used in histological applications. Alternatively, polynucleotide probes may be used within such applications.

[2008] As noted above, to improve sensitivity, multiple tumor protein markers may be assayed within a given sample. It will be apparent that binding agents specific for different proteins provided herein may be combined within a single assay. Further, multiple primers or probes may be used concurrently. The selection of tumor protein markers may be based on routine experiments to determine combinations that results in optimal sensitivity. In addition, or alternatively, assays for tumor proteins provided herein may be combined with assays for other known tumor antigens.

[2009] The present invention further provides kits for use within any of the above diagnostic methods. Such kits typically comprise two or more components necessary for performing a diagnostic assay. Components may be compounds, reagents, containers and/or equipment. For example, one container within a kit may contain a monoclonal antibody or fragment thereof that specifically binds to a tumor protein. Such antibodies or fragments may be provided attached to a support material, as described above. One or more additional containers may enclose elements, such as reagents or buffers, to be used in the assay. Such kits may also, or alternatively, contain a detection reagent as described above that contains a reporter group suitable for direct or indirect detection of antibody binding.

[2010] Alternatively, a kit may be designed to detect the level of mRNA encoding a tumor protein in a biological sample. Such kits generally comprise at least one oligonucleotide probe or primer, as described above, that hybridizes to a polynucleotide encoding a tumor protein. Such an oligonucleotide may be used, for example, within a PCR or hybridization assay. Additional components that may be present within such kits include a second oligonucleotide and/or a diagnostic reagent or container to facilitate the detection of a polynucleotide encoding a tumor protein.

[2011] The following Examples are offered by way of illustration and not by way of limitation.

### EXAMPLES

### Example 1

### Identification of Kidney Tumor Protein cDNAs

[2012] This Example illustrates the identification of cDNA molecules encoding kidney tumor proteins.

[2013] A PCR based subtraction method, as developed by Clontech (Palo Alto, Calif.), was utilized to create a cDNA library enriched for Kidney tumor-specific antigens. To construct this library (KAM1), transcripts from a pool of three primary kidney tumors (Tester) were subtracted with a set of transcripts from normal tissues (Driver) consisting of brain, pancreas, bone marrow, lung, skeletal muscle, heart, kidney, liver, and small intestine. The subtraction was executed according to Clontech recommendations with the following changes: 1) cDNA was restricted with a mixture of enzymes, including Mscl, PvuII, Stul, and Dral, instead of the Clontech recommended single enzyme, Rsal; 2) The ratio of driver to tester cDNA was increased to 76:1 in the hybridization steps to give a more stringent subtraction. To analyze the efficiency of the subtraction, the housekeeping gene actin was PCR amplified from dilutions of subtracted as well as unsubtracted PCR samples. Following PCR amplification, the cDNAs were cloned into the pCR2.1-TOPO plasmid (Invitrogen, Carlsbad, Calif.). The complexity and redundancy of the library was characterized by sequencing 192 clones. Of these, 157 had inserts that could be sequenced and analyzed by comparing to public databases (Genbank, GenSeq, huEST). These analyses suggest that the library is enriched for genes overexpressed in kidney tumor samples. Disclosed herein are 157 sequences derived from the KAM1 subtracted library. Those sequences showing some degree of similarity to known sequences in Genbank are shown in Table 2. Those cDNAs that showed no significant similiarity to any known sequences are listed in Table 3.

[2014] An additional 1,824 clones were screened, yielding 1,535 sequences, disclosed in SEQ ID NOs:158-1692, as set forth in the section entitled “Brief Description of the Sequence Identifiers”.

TABLE 2
GENBANK SEARCH RESULTS FOR cDNA MOLECULES
ENCODING KIDNEY TUMOR PROTEINS

| SEQ. | Clone | |
|---|---|---|
| ID. NO: | Identifier | Description |
| 1 | 60668 | camptothecin resistant clone CEM/C2 DNA |
| | | topoisomerase I |
| 3 | 60670 | Nuclear prelamin A recognition factor (NARF) |
| 4 | 60671 | AML1 mRNA for AML1c protein (acute myeloid |
| | | leukemia alternatively spliced product) |
| 5 | 60672 | Pendred syndrome (PDS) |
| 7 | 60674 | 12p13.3 PAC RPCI1-96H9 |
| 8 | 60675 | mRNA for RTP |
| 9 | 60676 | Clone HQ0518 PRO0518 |
| 10 | 60678 | chr. 16 clone RP11-311O11 |
| 12 | 60680 | integrin, alpha 6 (ITGA6) |
| 13 | 60681 | histone acetyltransferase (GCN5) |
| 14 | 60682 | Ku (p70/p80) subunit mRNA |
| 16 | 60684 | mRNA for KIAA0576 protein, partial cds |
| 17 | 60685 | ribosomal protein L9 (RPL9) |
| 18 | 60686 | fatty acid binding protein 7, brain (FABP7) mRNA |
| 20 | 60688 | clone 25077 mRNA seq |
| 21 | 60689 | cystatin B (stefin B) (CSTB) |
| 22 | 60690 | cytoplasmic antiproteinase = 38 kda intracellular |
| | | serine proteinase inhibitor |
| 23 | 60691 | chr. 16 BAC clone CIT987SK-44M2 |
| 24 | 60692 | heme oxygenase |
| 25 | 60693 | nickel-specific induction protein (Cap43) |
| 26 | 60694 | immunoglobulin lambda light chain gene |
| 27 | 60695 | chr. 22 Cosmid Clone 46a9 In DGCR Region |
| 28 | 60697 | H. sapiens ERF-1 mRNA 3′ end. |
| 29 | 60698 | cathepsin B mRNA |
| 30 | 60699 | guanylate binding protein isoform II (GBP-2) |
| | | mRNA |
| 33 | 60703 | vacuolor sorting protein 29 (VPS29) mRNA, |
| | | complete cds |
| 34 | 60704 | interferon-inducible mRNA (cDNA 6-26) |
| 35 | 60705 | BAC clone CTA-293F17 from 7p15-p21 |
| 36 | 60706 | 12p13.3 PAC RPCI1-96H9 |
| 37 | 60707 | angiopoietin 1 (ANGPT1) |
| 38 | 60708 | H. sapiens (HepG2) LAL mRNA for lysosomal acid |
| | | lipase |
| 39 | 60709 | CD9 antigen (p24) (CD9) |
| 40 | 60711 | protein tyrosine kinase 9 (PTK9) mRNA. |
| 41 | 60712 | calnexin |
| 42 | 60715 | DNA seq. from clone RP4-620E11 on chr. 20q11.2- |
| | | 12 |
| 43 | 60716 | mRNA for lipocortin II |
| 45 | 60718 | proteasome subunit LMP7 (allele LMP7C) mRNA |
| 46 | 60719 | MHC class I region ORF |
| 47 | 60720 | aldehyde reductase mRNA |
| 48 | 60721 | DMRT2/terra-like protein (DMRT2) mRNA, |
| | | alternatively spliced. |
| 50 | 60723 | insulin-like growth factor-binding protein-3 gene, |
| | | clone HL1006d. |
| 51 | 60725 | DNA seq. from clone RP5-841K13 on chr. 20 |
| 52 | 60727 | H. sapiens OZF |
| 53 | 60729 | a disintegrin and metalloproteinase domain 9 |
| | | (meltringamma) (ADAM9) |
| 54 | 60730 | vascular endothelial growth factor mRNA |
| 55 | 60731 | cDNA FLJ20343 fis, clone HEP13649. |
| 56 | 60732 | NADH dehydrogenase subunit 2 (ND2) gene |
| 57 | 60733 | HSPC147 mRNA |
| 58 | 60734 | complement C1q A chain precursor |
| 59 | 60735 | mRNA for sterol-C5-desaturase |
| 60 | 60736 | mRNA for docking protein BRDG1 |
| 61 | 60738 | HFB30 mRNA |
| 62 | 60739 | sirtuin type 1 (SIRT1) mRNA |
| 63 | 60742 | serologically defined colon cancer antigen 1 |
| | | (SDCCAG1) |
| 64 | 60743 | chr. 17, clone HCIT48C15 |
| 65 | 60744 | cDNA FLJ10684 fis, clone NT2RP3000220 |
| 66 | 60745 | hnRNP H |
| 67 | 60747 | mammary tumor-associated protein INT6 |
| 68 | 60749 | Rho GTPase activating protein 6 (ARHGAP6), |
| | | transcript variant 1 |
| 69 | 60750 | clone 24448 unknown mRNA |
| 70 | 60751 | calpastatin mRNA, partial cds, short 3′UTR |
| 71 | 60752 | endocytic receptor (macrophage mannose receptor |
| | | fam.) (KIAA0709) |
| 72 | 60753 | mRNA; cDNA DKFZp761P019 (from clone |
| | | DKFZp761P019). |
| 74 | 60757 | thymosin beta-4 mRNA |
| 75 | 60758 | mRNA for KIAA1252 protein |
| 76 | 60759 | H. sapiens SOD-2 gene for manganese superoxide |
| | | dismutase |
| 77 | 60760 | HFB30 mRNA |
| 78 | 60762 | HTGN29 |
| 79 | 60763 | R. norvegicus phosphatidylinositol 5-phosphate 4- |
| | | kinase gamma |
| 80 | 63967 | uncharacterized bone marrow protein BM042 |
| 81 | 63968 | nickel-specific induction protein (Cap43) |
| 82 | 63969 | Hu DNA seq. from clone RP11-481A22 on chr. 13 |
| 83 | 63970 | mRNA for vimentin |
| 84 | 63971 | MEN1 (Multiple endocrine neoplasia type 1) region |
| | | clone epsilon/beta |
| 85 | 63972 | Mus musculus putative transcription factor ALF-4 |
| 86 | 63973 | H. sapiens clone RP11-2I8 |
| 87 | 63974 | prostatic binding protein (PBP) |
| 90 | 63978 | calcium-binding transporter |
| 91 | 63979 | mRNA for high mobility group-1 protein (HMG-1) |
| 92 | 63981 | 78 kdalton glucose-regulated protein (GRP78) gene |
| 93 | 63982 | brain my047 protein mRNA |
| 94 | 63983 | annexin A4 (ANXA4) |
| 95 | 63984 | vascular endothelial growth factor (VEGF) mRNA, |
| | | 3′UTR |
| 96 | 63985 | transaldolase-related protein gene, exons 3-8 |
| 98 | 63987 | 26-kDa cell surface protein TAPA-1 mRNA |
| 100 | 63991 | osteopontin mRNA |
| 101 | 63994 | beta-2 microglobulin gene |
| 102 | 63995 | PTD010 protein (PTD010) (from pituitary tumor) |
| 103 | 63996 | KIAA1007 protein (KIAA1007) |
| 104 | 63997 | mRNA for dTDP-4-keto-6-deoxy-D-glucose 4- |
| | | reductase |
| 105 | 63999 | M. musculus Rel domain-containing transcription |
| | | factor NFAT5 |
| 106 | 64000 | HLA-B gene (HLA-B*0801 allele) |
| 107 | 64001 | UDP-glucose dehydrogenase (UGDH) |
| 109 | 64005 | major histocompatibility class I HLA-Cw2.2 heavy |
| | | chain |
| 110 | 64006 | BAC clone CTA-293F17 from 7p15-p21 |
| 111 | 64007 | mRNA for TM7XN1 protein. |
| 113 | 64009 | DNA for osteopontin |
| 114 | 64010 | mRNA for DEC1 |
| 115 | 64011 | MEN1 region clone epsilon/beta mRNA, 3′ |
| | | fragment. |
| 116 | 64012 | KIAA0247 gene product (KIAA0247) |
| 117 | 64013 | splicing factor (CC1.3) |
| 118 | 64016 | lysosomal-associated protein transmembrane 4 |
| | | alpha(MBNT) |
| 120 | 64019 | cDNA: FLJ22952 fis, clone KAT09742 |
| 121 | 64020 | cDNA DKFZp434M229 (from clone |
| | | DKFZp434M229) |
| 122 | 64022 | parathyroid hormone-related protein |
| 123 | 64023 | cDNA: FLJ23027 fis, clone LNG01826 |
| 124 | 64025 | KIT protein and alternatively spliced KIT protein |
| | | (KIT) gene |
| 125 | 64028 | putative endothelin receptor type B-like protein |
| 126 | 64029 | SC35-interacting protein 1 (SRRP129) |
| 127 | 64030 | 12 BAC RP11-427C3 |
| 128 | 64031 | angiopoietin-related protein mRNA |
| 129 | 64032 | calcyclin binding protein (CACYBP) |
| 130 | 64033 | clone 24448 unknown mRNA |
| 131 | 64034 | 11p14.3 PAC clone pDJ939m16 |
| 132 | 64035 | PTB domain adaptor protein CED-6 |
| 133 | 64036 | mRNA for KIAA1380 protein |
| 135 | 64038 | H. sapiens SPR-2 mRNA for GT box binding |
| | | protein |
| 136 | 64039 | GL004 protein [novel gene fr. liver non-tumor- |
| | | tissue; unpub.] |
| 137 | 64040 | KIAA0141 gene product (KIAA0141) |
| 138 | 64041 | CD9 antigen mRNA |
| 139 | 64042 | CGI-134 protein (LOC51023), mRNA. |
| 140 | 64043 | CGI-134 protein (LOC51023), mRNA. |
| 141 | 64044 | chr. 17, clone hRPK.209_D_14 |
| 142 | 64045 | H. sapiens polyA site DNA. |
| 143 | 64046 | thymosin beta-4 mRNA |
| 144 | 64047 | nicotinamide N-methyltransferase (NNMT) |
| 145 | 64048 | M. musculus cytoplasmic dynein intermediate chain |
| | | 2 (Dncic2) |
| 146 | 64049 | mRNA for Sid1669p |
| 147 | 64050 | putative N-acetyltransferase CML1 (CML1) |
| 148 | 64052 | cDNA: FLJ21587 fis, clone COL06946. |
| 149 | 64053 | KIT protein and alternatively spliced KIT protein |
| | | (KIT) gene |
| 150 | 64054 | H. sapiens interferon gamma receptor 1 gene, |
| | | microsatelliteseq. |
| 151 | 64055 | H. sapiens alpha NAC |
| 152 | 64056 | mRNA for KIAA0662 protein |
| 153 | 64058 | mRNA for RTP |
| 155 | 64060 | fibrillin mRNA |
| 156 | 64061 | mRNA for LDL-receptor related protein |
| 157 | 64062 | BAC clone CTA-300C3 from 7q31.2 |

[2015] TABLE 3
cDNA MOLECULES ENCODING KIDNEY TUMOR PROTEINS
SHOWING NO SIGNIFICANT SIMILARITY
TO KNOWN SEQUENCES

| SEQ. ID. | Clone |
|---|---|
| NO: | Identifier |
| 2 | 60669 |
| 6 | 60673 |
| 11 | 60679 |
| 15 | 60683 |
| 19 | 60687 |
| 31 | 60700 |
| 32 | 60702 |
| 44 | 60717 |
| 49 | 60722 |
| 73 | 60756 |
| 88 | 63975 |
| 89 | 63976 |
| 97 | 63986 |
| 99 | 63990 |
| 108 | 64002 |
| 112 | 64008 |
| 119 | 64018 |
| 134 | 64037 |
| 154 | 64059 |

### Example 2

### Analysis of Expression of Kidney Tumor cDNAS Using Microarray Technology

[2016] In additional studies, kidney tumor- and tissue-specific cDNAs were identified and evaluated for overexpression in specific tumor tissues by microarray analysis. Using this approach, cDNA sequences were PCR amplified and their mRNA expression profiles in tumor and normal tissues were examined using cDNA microarray technology essentially as described (Shena, M. et al., 1995 Science 270:467-70). In brief, the clones were arrayed onto glass slides as multiple replicas, with each location corresponding to a unique cDNA clone (as many as 5500 clones can be arrayed on a single slide, or chip). Each chip was hybridized with a pair of cDNA probes that were fluorescence-labeled with Cy3 and Cy5, respectively. Typically, 1 μg of polyA⁺ RNA was used to generate each cDNA probe. After hybridization, the chips were scanned and the fluorescence intensity recorded for both Cy3 and Cy5 channels. There were multiple built-in quality control steps. First, the probe quality was monitored using a panel of ubiquitously expressed genes. Secondly, the control plate also included yeast DNA fragments of which complementary RNA may be spiked into the probe synthesis for measuring the quality of the probe and the sensitivity of the analysis. Currently, the technology offers a sensitivity of 1 in 100,000 copies of mRNA. Finally, the reproducibility of this technology was ensured by including duplicated control cDNA elements at different locations.

[2017] A total of 1824 clones from the KAM1 subtracted cDNA library described in Example 1, were arrayed. The arrays were probed with 32 probe pairs (normal tissues labeled with Cy5 and tumor-specific probes labeled with Cy3). Analysis consisted of determining the ratio of the mean hybridization signal for a particular element (cDNA) using the two sets of probes. The ratio represents a reflection of the over- or under-expression of the element (cDNA) within a probe population. Probe groups were set up to identify cDNAs with high differential expression in probe group#1 as compared to probe group#2. Probe group#1 consisted of 12 kidney tumors, whereas probe group#2 consisted of 31 normal tissues, including normal kidney tissue. A threshold (fold-overexpression in probe group#1) was set at 2.0.

[2018] cDNAs were grouped according to their value for mean signal 1 (probe group#1; kidney tumor) and mean signal 2 (probe group#2; normal tissues including kidney). cDNAs which had the potential for no normal tissue expression (mean 2<0.1) were grouped into “high” (mean 1>2.0), “medium” (mean 1=0.1-0.2) and “low” (mean 1<0.1) expression candidate groups. cDNAs that had a mean 2 of 0.1-0.2 were considered as having a potential for low normal tissue expression and elements that had a mean signal 2>0.2 were considered as candidates with a potential for higher normal tissue expression. Based on this initial analysis and visual analysis of the associated microArray data, elements with “high” (mean 1>2.0), “medium” (mean 10.1-0.2) and a “potential for low normal expression” (mean 2 of 0.1-0.2) were considered further as being candidates exhibiting overexpression in kidney tumor (and normal tissue).

[2019] The cDNAs identified as described above as being overexpressed in kidney tumors as compared to normal tissue were then sequenced, and used as a query in a BLAST search of public databases in order to identify extended sequence and to confirm their identity. The sequences are set forth in SEQ ID NOs:1693-1843. Table 4 summarizes the microarray and GenBank search results for those sequences that showed some degree of similarity to sequences in the public databases. Those sequences that showed no significant similarity to sequences in the GenBank database are listed in Table 5 (SEQ ID NOs:1836-1843 have hits in the huEST database). Full-length sequence from GenBank is presented for numerous cDNAs in SEQ ID NOs:1693-1793.

TABLE 4
cDNAs ENCODING KIDNEY TUMOR PROTEINS THAT SHOWED
SOME DEGREE OF SIMILARITY
TO SEQUENCES IN PUBLIC DATABASES

| SEQ ID | | | | | |
|---|---|---|---|---|---|
| NO. | Ratio | Clone | Candidate | GenBank ID | Description |
| 1693 | 12.5 | KKAM202 G1 | K1549P | 2645202 | Fatty acid binding protein |
| | | | | | (FABP7) |
| 11694 | 4.17 | SSAM113 D8 | K1554P | 398163 | Insulin-like growth factor |
| | | | | | binding protein-3 |
| 1695 | 4.17 | KAM207 D12 | K1553P | 7327887 | Renal cell carcinoma |
| | | | | | associated antigen G250 |
| 1696 | 3.32 | KAM217 E6 | | 533516 | MAGE-4b antigen (MAGE4b) |
| 1697 | 3.01 | SAM121 C3 | | 30125 | Type I interstitial collagenase |
| 1698 | 2.98 | LLAM27 D7 | | 181067 | C-reactive protein gene |
| 1699 | 2.59 | SAM113 G7 | | 182203 | Estrogen receptor |
| 1700 | 2.31 | SAM115 F7 | | 3860076 | GW112 protein (GW112) |
| 1701 | 2.3 | KAM216 A10 | | 12620131 | Renal sodium/sulfate |
| | | | | | cotransporter |
| 1702 | 15.58 | KAM202 C11 | K1548P | 14721305 | ESM-1, endothelial cell- |
| | | | | | specific molecule 1 |
| 1703 | 6.99 | SAM114 H4 | | 12653344 | Junction plakoglobin |
| 1704 | 5.44 | KAM210 C2 | K1619P | 3719220 | Vascular endothelial growth |
| | | | | | factor |
| 1705 | 5.11 | SAM117 E10 | | 13027804 | Matrix metalloproteinase 7 |
| | | | | | (matrilysin, uterine), MMP7 |
| 1706 | 4.86 | KAM218 D3 | K1620P | 1060889 | Annexin IV (carbohydrate- |
| | | | | | binding protein p33/41) |
| 1707 | 4.02 | KAM208 C12 | K1587P | 187558 | MET proto-oncogene |
| 1708 | 3.76 | KAM202 B11 | | 4507466 | Transforming growth factor, |
| | | | | | beta-induced, 68kD (TGFBI) |
| 1709 | 3.35 | KAM202 E8 | | 2138313 | Lysyl hydroxylase isoform 2 |
| | | | | | (PLOD2) |
| 1710 | 3.31 | KAM203 G5 | | 2463627 | Monocarboxylate transporter |
| | | | | | (MCT) putative mRNA |
| 1711 | 3.29 | KAM206 D6 | | 3600027 | Dysferlin |
| 1712 | 3.29 | KAM218 D7 | | 3426297 | HIC protein isoform p40 and |
| | | | | | HIC protein isform p32 |
| 1713 | 3.19 | KAM209 H9 | K1588P | 12583668 | DEC2, bHLH protein |
| 1714 | 2.93 | KAM217 D2 | | 1048988 | CD9 antigen |
| 1715 | 2.86 | KAM208 F8 | | 4689259 | Sporting nexin 10 (SNX10) |
| 1716 | 2.8 | KAM202 B7 | | 189852 | Platelet-type |
| | | | | | Phosophofructokinase |
| 1717 | 2.75 | KAM212 A9 | | 13325286 | Enolase 1, (alpha) |
| 1718 | 2.75 | KAM218 G1 | | 530822 | Epidermal growth factor |
| | | | | | receptor kinase substrate |
| | | | | | (Eps8) |
| 1719 | 2.73 | KAM217 D7 | | 188397 | MHC class II HLA-DR2-Dw12 |
| | | | | | mRNA DQw1-beta |
| 1720 | 2.7 | KAM218 C10 | | 2338289 | Proline-rich Gla protein 1 |
| | | | | | (PRGP1) |
| 1721 | 2.6 | KAM201 C7 | | 7705717 | CGI-26 protein (LOC51071) |
| 1722 | 2.58 | SAM131 E12 | | 187605 | MHC class I HLA-A2 gene |
| 1723 | 2.56 | KAM214 B10 | | 7019382 | Fibronectin leucine rich |
| | | | | | transmembrane protein 3 |
| | | | | | (FLRT3) |
| 1724 | 2.52 | LLAM25 B11 | | 1907392 | Proneurotensin/ |
| | | | | | proneuromedin N |
| 1725 | 2.52 | LLAM29 E3 | | 3550342 | Cellular repressor of E1A- |
| | | | | | stimulated genes, CREG |
| 1726 | 2.52 | SAM116 B3 | | 6563215 | Ribosomal protein L13 |
| 1727 | 2.51 | KAM218 A9 | | 180676 | C-type natiuretic peptide |
| 1728 | 2.51 | KAM208 B7 | | 4588525 | Nuclear chloride channel |
| | | | | | (NCC27) |
| 1729 | 2.5 | LLAM28 B4 | | 2522321 | PTPL1-associated RhoGAP |
| 1730 | 2.49 | KAM207 C12 | | 4503916 | Growth arrest specific 11 |
| | | | | | (GAS11) |
| 1731 | 2.48 | LLAM25 B6 | | 3493208 | Aldo-keto reductase |
| 1732 | 2.48 | LLAM25 B1 | | 14738930 | Protease, serine, 11 (IGF |
| | | | | | binding) (PRSS11) |
| 1733 | 2.47 | KAM211 H5 | | 1808577 | Proteasome subunit p112 |
| 1734 | 2.46 | LLAM29 H3 | | 2181921 | FUS gene, intron 7 |
| 1735 | 2.46 | LLAM25 A8 | | 6523802 | Adrenal gland protein AD-005 |
| | | | | | Mrna |
| 1736 | 2.41 | KAM217 H11 | | 7542722 | DHHC1 protein |
| 1737 | 2.39 | SAM114 A8 | | 12737025 | Transmembrane 4 |
| | | | | | superfamily member 3 |
| 1738 | 2.34 | SAM129 B11 | | 12214174 | ORF1-FL49, putative nuclear |
| | | | | | protein |
| 1739 | 2.32 | KAM215 H1 | | 12653620 | HIRA-interacting protein 3 |
| 1740 | 2.28 | KAM207 D7 | | 5731112 | Translocon-associated |
| | | | | | protein alpha subunit |
| 1741 | 2.27 | KAM217 D3 | | 12056961 | Calpastatin |
| 1742 | 2.27 | KAM215 G3 | | 4106060 | CCR4-associated factor 1 |
| | | | | | (POP2) |
| 1743 | 2.24 | KAM202 H11 | | 31967 | Histone H1, H1.2 gene |
| 1744 | 2.23 | KAM209 C5 | | 12005668 | HT028 Mrna |
| 1745 | 2.22 | KAM205 D7 | | 3044063 | PHD finger protein 2 (PHF2) |
| 1746 | 2.21 | KAM211 G11 | | 7596916 | Down syndrome candidate |
| | | | | | region protein (DSCR1) |
| 1747 | 2.19 | KAM200 D7 | | 1654350 | Hermansky-Pudlak syndrome |
| | | | | | protein (HPS) |
| 1748 | 2.18 | KAM209 F3 | | 3513452 | C2H2 zinc finger protein |
| | | | | | PLAGL1 (PLAGL1) |
| 1749 | 2.18 | KAM212 B11 | | 13358172 | Dectin-1, putative |
| | | | | | transmembrane protein |
| 1750 | 2.18 | KAM212 D10 | | 4929634 | CGI-83 protein |
| 1751 | 2.15 | KAM200 F11 | | 13430284 | C1orf13 |
| 1752 | 2.14 | KAM217 H7 | | 4826845 | myosin VI (MYO6) |
| 1753 | 2.12 | SAM120 G5 | | 179771 | Carbonic anhydrase II |
| 1754 | 2.09 | SAM129 G1 | | 12804950 | Calcium-binding protein |
| | | | | | (intestinal-related) |
| 1755 | 2.09 | KAM205 A12 | | 4557806 | Ocular albinism I (Nettleship- |
| | | | | | Falls) (OA1) |
| 1756 | 2.09 | KAM202 D8 | | 13112002 | N-myc downstream regulated, |
| | | | | | clone MGC:4412 |
| 1757 | 2.08 | KAM205 C7 | | 12729191 | Inositol 1,4,5-triphosphate |
| | | | | | receptor, type 1 (ITPR1) |
| 1758 | 2.07 | LLAM26 F3 | | 190888 | RASF-A PLA2 |
| 1759 | 2.04 | KAM218 G8 | | 190515 | Phosphatase-1 catalytic |
| | | | | | subunit |
| 1760 | 2.02 | KAM213 A4 | | 13649713 | Dendritic cell-associated C- |
| | | | | | type lectin-1 beta |
| 1761 | 2.01 | SAM116 E7 | | 7229100 | CA11 mRNA |
| 1762 | 2 | SAM127 D8 | | 12804646 | Annexin A2 |
| 1763 | 7.83 | KAM211 H4 | K1621P | 4499957 | DKFZp564N1116 |
| 1764 | 4.35 | KAM216 C3 | K1550P | 11431676 | FLJ11342 |
| 1765 | 4.04 | KAM213 F11 | | 12729821 | DKFZP434B103 |
| 1766 | 3.85 | KAM218 F4 | K1591P | 10436988 | FLJ21005 |
| 1767 | 3.55 | KAM202 A9 | | 7018479 | DKFZp761D0223 |
| 1768 | 3.34 | KAM217 E1 | K1622P | 12803864 | KIAA1445 |
| 1769 | 3.02 | KAM205 C6 | K1551P | 3882278 | KIAA0779 |
| 1770 | 2.99 | KAM203 B8 | | 10437886 | FLJ21730 |
| 1771 | 2.88 | KAM210 C8 | | 10432773 | FLJ11506 |
| 1772 | 2.86 | LLAM25 D8 | | 14149943 | KLJ23277 |
| 1773 | 2.64 | KAM204 G2 | K1555P | 9506636 | FLJ11116, similar to rab11- |
| | | | | | binding protein |
| 1774 | 2.64 | KAM218 C3 | K1590P | 10998290 | QnpA-21739 cDNA from |
| | | | | | Macaca fascicularis brain |
| 1775 | 2.61 | KAM201 E10 | | 9506622 | hypothetical protein similar to |
| | | | | | ankyrin repeat-containing |
| | | | | | protein |
| 1776 | 2.58 | SAM113 C4 | | 10241947 | QnpA-10763 cDNAfrom |
| | | | | | Macaca fascicularis brain |
| 1777 | 2.53 | KAM207 B8 | | 7018479 | DKFZp761D00223 |
| 1778 | 2.48 | KAM207 C9 | | 559702 | KIAA0068 |
| 1779 | 2.48 | KAM217 C3 | | 3243034 | RuvB-like protein RUVBL1 |
| 1780 | 2.44 | KAM204 A6 | | 5262490 | DKFZp564D0462 |
| 1781 | 2.39 | SAM125 H7 | | 6807811 | DKFZp434P231 |
| 1782 | 2.24 | SAM129 G3 | | 13376194 | FLJ23018 |
| 1783 | 2.18 | LLAM27 F7 | | 10435651 | FLJ13598 |
| 1784 | 2.14 | LLAM26 F5 | | 13528719 | MGC:10534 cDNA clone, |
| | | | | | similar to CG7083 |
| 1785 | 2.11 | KAM217 G11 | | 3327079 | KIAA0633 |
| 1786 | 2.11 | KAM217 G9 | | 13376196 | FLJ12529 |
| 1787 | 2.1 | SAM115 B3 | | 2280487 | KIAA0392 |
| 1788 | 2.07 | KAM211 B4 | | 3043547 | KIAA0512 |
| 1789 | 2.05 | KAM205 E9 | | 12052797 | DKFZp564K142 |
| 1790 | 2.04 | KAM210 B12 | | 12224876 | DKFZp667B0711 |
| 1791 | 2.02 | KAM214 D1 | | 10435597 | FLJ13555 |
| 1792 | 2.02 | LLAM26 C2 | | 6841301 | HSPC326 |
| 1793 | 2.01 | KAM209 B11 | | 5262707 | DKFZp586K1123 |
| 1794 | 16.92 | KAM209 D9 | K1547P | 8886966 | chromosome 19 clone CTC- |
| | | | | | 513N18 |
| 1795 | 3.12 | KAM213 D5 | c.f. 1547P | 8886966 | chromosome 19 clone CTC- |
| | | | | | 513N18 |
| 1796 | 4.73 | KAM204 B7 | c.f. K1586P | 11120989 | chromosome 6 clone RP1- |
| | | | | | 139G21 |
| 1797 | 4.68 | KAM203 A1 | K1586P | 11120989 | chromosome 6 clone RP1- |
| | | | | | 139G21 |
| 1798 | 2.59 | KAM200 C7 | | 2842785 | BAC clone CTA-293F17 from |
| | | | | | 7p15-p21 |
| 1799 | 2.23 | KAM216 G7 | | 2842785 | BAC clone CTA-293F17 from |
| | | | | | 7p15-p21 |
| 1800 | 2.15 | KAM212 H11 | | 2842785 | BAC clone CTA-293F17 from |
| | | | | | 7p15-p21 |
| 1801 | 11.39 | KAM216 G8 | K1623P | 8650282 | gDNA from chromosome |
| | | | | | 4q13 |
| 1802 | 8.55 | KAM213 F9 | | 8748931 | BAC clone RP11-507K12 |
| | | | | | from 7p11.2-p21 |
| 1803 | 6.86 | KAM200 C11 | | 13470139 | chromosome 5 clone CTD- |
| | | | | | 2062A1 |
| 1804 | 6.48 | KAM217 D10 | | 8886966 | chromosome 19 clone |
| 1805 | 5.36 | KAM213 D11 | K1589P | 1809226 | BAG clone RG104l04 from |
| | | | | | 7q21-7q22 |
| 1806 | 4.28 | LLAM25 G9 | K1624P | 14329875 | chromosome Xq22 clone |
| | | | | | RP1-75H8 |
| 1807 | 4.01 | KAM212 B8 | | 9801555 | chromosome 20 clone RP1- |
| | | | | | 132F21 |
| 1808 | 3.78 | KAM204 G8 | | 4753230 | BAC clone RP11-486P11 |
| | | | | | from 7p21-p15.1 |
| 1809 | 3.65 | KAM216 G9 | | 13357387 | chromosome 18, clone RP11- |
| | | | | | 106E15 |
| 1810 | 3.36 | KAM202 C5 | K1592P | 2887277 | PAC 454G6 on chromosome |
| | | | | | 1q24 |
| 1811 | 3.14 | SAM105 D10 | K1593P | 11120958 | BAG clone RP11-549B18 |
| | | | | | from 18 |
| 1812 | 3.04 | KAM217 D6 | | 8844110 | chromosome 19 clone |
| 1813 | 3 | KAM217 B10 | | 10835353 | chromosome 2, clone RP11- |
| | | | | | 387A1 |
| 1814 | 2.93 | KAM217 H1 | K1552P | 10185469 | chromosome 13 clone RP11- |
| | | | | | 251J8 |
| 1815 | 2.75 | KAM208 B2 | | 13560018 | chromosome 6 clone RP11- |
| | | | | | 294H11 |
| 1816 | 2.58 | LLAM26 A2 | | 13508860 | chromosome 6 clone RP13- |
| | | | | | 143G15 |
| 1817 | 2.55 | KAM208 F10 | | 7981300 | chromosome 6 clone RP3- |
| | | | | | 399E4 |
| 1818 | 2.35 | KAM204 F7 | | 4263638 | chromosome 4 clone |
| 1819 | 2.34 | SAM122 G5 | | 11038582 | clone RP11-417F21 |
| 1820 | 2.33 | KAM201 A9 | | 2598081 | Chromosome 11p15.5 pac |
| | | | | | pDJ608b4 |
| 1821 | 2.3 | KAM205 G3 | | 2337860 | BAC clone CTA-364P16 from |
| | | | | | 7q31 |
| 1822 | 2.25 | SAM124 G9 | | 13123898 | chromosome 10 |
| 1823 | 2.22 | KAM216 D9 | | 11990063 | chromosome 20 clone RP11- |
| | | | | | 348I14 |
| 1824 | 2.21 | KAM216 B12 | | 5678818 | chromosome 4 clone |
| 1825 | 2.11 | KAM218 D8 | | 13173624 | chromosome 5 clone CTD- |
| | | | | | 2048J22 |
| 1826 | 2.1 | KAM215 B11 | | 3688105 | chromosome 17, clone |
| | | | | | hRPC.1073_F_15, complete |
| | | | | | sequence |
| 1827 | 2.08 | SAM130 A1 | | 1841541 | chromosome 6 |
| 1828 | 2.05 | KAM205 F5 | | 13493060 | 12q BAC RP11-798P24 |
| 1829 | 2.04 | KAM205 C4 | | 3253131 | chromosome 17 |
| 1830 | 2.01 | SAM115 G12 | | 13513077 | chromosome 14 |

[2020] TABLE 5
cDNAs ENCODING KIDNEY TUMOR PROTEINS THAT SHOWED
NO SIGNIFICANT SIMILARITY TO SEQUENCES IN GENBANK

| SEQ ID | | |
|---|---|---|
| NO. | Ratio | Clone |
| 1831 | 3.7 | KAM207 D6 |
| 1832 | 2.73 | LLAM28 C3 |
| 1833 | 2.65 | KAM205 D5 |
| 1834 | 2.4 | KAM205 G7 |
| 1835 | 2.24 | SAM120 H3 |
| 1836 | 9.68 | KAM201 A1 |
| 1837 | 3.56 | KAM211 H3 |
| 1838 | 3.53 | KAM216 B8 |
| 1839 | 2.81 | KAM216 D4 |
| 1840 | 2.54 | KAM201 E4 |
| 1841 | 2.51 | KAM214 C7 |
| 1842 | 2.31 | KAM206 C4 |
| 1843 | 2.25 | KAM215 C1 |

### Example 3

### Analysis of cDNA Expression Using Real-Time PCR

[2021] Several cDNAs identified by microarray analysis in Example 2 as being overexpressed in kidney tumors as compared to normal kidney and/or a variety of normal tissues were characterized further by Real-Time PCR analysis. These cDNAs were designated K1547P-K1555P, K1586P-K1593P, and K1619P-K1624P. The first-strand cDNA used in the quantitative real-time PCR was synthesized from 20 μg of total RNA that was treated with DNase I (Amplification Grade, Gibco BRL Life Technology, Gaithersburg, Md.), using Superscript Reverse Transcriptase (RT) (Gibco BRL Life Technology, Gaithersburg, Md.). Real-time PCR was performed with a GeneAmp™ 5700 sequence detection system (PE Biosystems, Foster City, Calif.). The 5700 system uses SYBRTM green, a fluorescent dye that only intercalates into double stranded DNA, and a set of gene-specific forward and reverse primers. The increase in fluorescence was monitored during the whole amplification process. The optimal concentration of primers was determined using a checkerboard approach and a pool of cDNAs from tumors was used in this process. The PCR reaction was performed in 25 μl volumes that included 2.5 μl of SYBR green buffer, 2 μl of cDNA template and 2.5 μl each of the forward and reverse primers for the gene of interest. The cDNAs used for RT reactions were diluted 1:10 for each gene of interest and 1:100 for the β-actin control. In order to quantitate the amount of specific cDNA (and hence initial mRNA) in the sample, a standard curve was generated for each run using the plasmid DNA containing the gene of interest. Standard curves were generated using the Ct values determined in the real-time PCR which were related to the initial cDNA concentration used in the assay. Standard dilution ranging from 20-2×10⁶ copies of the gene of interest was used for this purpose. In addition, a standard curve was generated for β-actin ranging from 200 fg-2000 fg. This enabled standardization of the initial RNA content of a tissue sample to the amount of β-actin for comparison purposes. The mean copy number for each group of tissues tested was normalized to a constant amount of β-actin, allowing the evaluation of the over-expression levels seen with each of the genes.

[2022] MicroArray profiles, Real-Time data, and GenBank search results for the above listed clones are summarized in Table 6.

TABLE 6

| | | | | |
|---|---|---|---|---|
| | | | | Description |
| SEQ ID | Candidate | Short | | (Homo sapien unless |
| NO: | Number | Panel | Real Time Profile | otherwise specified |

High Expression (mean 1 > .02, mean 2 < 1.0):

| | | | | |
|---|---|---|---|---|
| 1794 | K1547P | Y | 7/9 T; low expn in normal | chromosome 19 clone |
| | | | thyroid and pancreas | CTC-513N18 |
| 1702 | K1548P | Y | 8/9 T; low/no expn in | ESM-1 protein, exon 3 |
| | | | normal tissues | |
| 1693 | K1549P | Y | 5/9 T; low/no expn in | fatty acid binding protein |
| | | | normal tissues | (FABP7) |
| 1805 | K1589P | N | | BAC clone RG104I04 from |
| | | | | 7q21-7q22 |
| 1797 | K1586P | Y | 7/9 low T; low expn in | choromosome 6 clone |
| | | | normal kidney, liver and | RP1-139G21 |
| | | | bladder | |
| 1764 | K1550P | Y | 9/9 T; low expn in most | FLJ11342 |
| | | | normal tissues | |
| 1695 | c.f. K1553P | Y | 8/9 T; expn in stomach, | renal cell carcinoma |
| | | | low expn in colon and | associated antigen G250 |
| | | | pancreas | |
| 1694 | K1554P | Y | 8/9 T; low expn in normal | insulin-like growth factor |
| | | | heart and liver | binding protein-3 |
| 1707 | K1587P | Y | 9/9 low T: expn most | MET proto-oncogene |
| | | | normal tissues | |
| 1810 | K1592P | Y | 6/9 T: no normal | PAC 454G6 on |
| | | | expression | chromosome 1q24 |
| 1713 | K1588P | Y | 8/9 T: expn in several | bHLH protein DEC2 |
| | | | normal tissues | |
| 1811 | K1593P | Y | 1/9 T; expn in most | BAC clone RP11-549B18 |
| | | | normal tissues | from 18 |
| 1795 | c.f. K1547P | Y | 7/9 T; low expn in normal | chromosome 19 clone |
| | | | thyroid and pancreas | CTC-513N18 |
| 1769 | K1551P | Y | 8/9 T; low expn in most | KIAA0779 |
| | | | normal tissues | |
| 1773 | K1555P | Y | Not determined | FLJ11116, similar to rab11- |
| | | | | binding protein |

Medium Expression (mean 1 = 0.1-0.2, mean 2 < 0.1):

| | | | | |
|---|---|---|---|---|
| 1766 | K1591P | N | | FLJ21005 |
| 1814 | K1552P | Y | 9/9 T; low expn in | chromosome 13 clone |
| | | | several normal tissues | RP11-251J8 |
| 1695 | K1553P | Y | 8/9 T; expn in stomach, | renal cell carcinoma |
| | | | low expn in colon and | associated antigen G250 |
| | | | pancreas | |
| 1694 | c.f. K1554P | N | | insulin-like growth factor |
| | | | | binding protein-3 |
| 1774 | K1590P | Y | 8/9 low T; expn in | QnpA-21739 cDNA clone |
| | | | several normal tissues | from Macaca fascicularis |
| | | | | brain |

Possible Low Normal Expression (mean 1 > 0.2, mean
2 = 0.1-0.2):

| | | | | |
|---|---|---|---|---|
| 1801 | K1623P | Y | 6/9 T; low expn in normal | 4q13 genomic sequence |
| | | | kidney and heart | |
| 1763 | K1621P | Y | 8/9 T; v. low expn in | cDNA DKFZp564N1116 |
| | | | pancreas | |
| 1704 | K1619P | Y | 9/9 T; expn in heart, lung | vascular endothelial growth |
| | | | and pancreas | factor |
| 1706 | K1620P | Y | 3/9 high expn in T; expn | annexin IV (carbohydrate- |
| | | | in pancreas | binding protein p33/41) |
| 1806 | K1624P | Y | 4/9 KidT, low expn in livT | chromosome Xq22 clone |
| | | | and stomT; expn in | RP1-75H8 |
| | | | pancreas | |
| 1768 | K1622P | Y | 7/9 T; low expn in brain | KIAA1445 |
| | | | and heart | |

Abbreviations: Expn: expression; liv: liver; stom: stomach; T: tumor;

[2023] The summary shown in Table 6 of the Real Time expression profiles that most of the cDNAs showed overexpression in kidney tumor samples specific normal tissue expression in some candidates. However, 4 (K1548P, K1549P, K1592P, and K1621 P) showed exceptional n profiles with extensive overexpression in the majority of kidney tumor samples and little or no expression in the normal tissues. Nucleotide sequences for all the cDNAs with “high” (mean 1>2.0), “medium” (mean 1 0.1-0.2) and a “potential for low normal expression” (mean 2 of 0.1-0.2), are set forth in Table 6.

[2024] Thus, the cDNAs described herein are overexpressed in kidney (renal) tumors and provide candidates to which therapeutic monoclonal antibodies (naked or conjugated to toxins or radioisotopes) may be targeted. In addition these candidates may also be targets for therapeutic T-cell vaccines and can be used as diagnostic markers for the detection and monitoring of kidney (renal) malignancy.

### Example 4

### Analysis of cDNA Expression Using LifeSeq Gold Datamining and Real-Time PCR

[2025] The Incyte Genomics LifeSeq Gold database (June 2001 release) was searched to identify cDNA sequences that represent genes that are up-regulated in kidney tumor tissue as compared to normal essential tissues. First, all libraries were identified within the LifeSeq Gold database that were constructed from kidney tumor and fetal kidney tissues (a total of 19 libraries with 83,602 clones) (see Table 7). Fetal kidney libraries were used because it is believed that genes that are transcribed in early development but not in healthy adult tissues will sometimes be transcribed again upon tumorigenesis.

TABLE 7
LIFESEQ GOLD KIDNEY LIBRARIES FOR TRANSCRIPT IMAGING

| Library Name | # clones | Library Description |
|---|---|---|
| KIDNTUP03 | 12,046 | kidney tumor, clear cell type cancer, pool, |
| | | NORM, 3′ CGAP |
| KIDNTUP06 | 7,669 | kidney tumor, clear cell type cancer, pool, |
| | | SUB, CGAP |
| KIDNTUP02 | 821 | kidney tumor, renal cell CA, 3′ CGAP |
| KIDNTUTI4 | 3,861 | kidney tumor, renal cell CA, 43 M, |
| | | m/KIDNNOT20 |
| KIDNTUE0 | 2,906 | kidney tumor, renal cell CA, 46 M, 5 RP |
| KIDNTUT13 | 3,771 | kidney tumor, renal cell CA, 51 F |
| KIDNTUT16 | 2,922 | kidney tumor, renal cell CA, 53 F, |
| | | m/KIDNNOT26 |
| KIDNTUT15 | 3,941 | kidney tumor, renal cell CA, 65 M |
| | | m/KIDNNOT19 |
| KIDNTUP01 | 5,141 | kidney tumor, renal cell CA, pool, 3′/5′ CGAP |
| KIDNTUP05 | 2,690 | kidney tumor, renal cell, 3′ CGAP |
| KIDNTUT01 | 3,724 | kidney tumor, Wilms', 8 mF |
| KIDNTUM01 | 4,631 | kidney tumor, Wilms', pool, WM/WN |
| KIDNFET01 | 7,834 | kidney, aw/anencephaly, fetal, 17 wF |
| KIDNFET02 | 3,442 | kidney, aw/hypoplastic left heart, fetal, 23 wM |
| KIDNFEE02 | 2,768 | kidney, aw/hypoplastic left heart, fetal, 23 wM, |
| | | 5 RP |
| KIDNFEC01 | 5,501 | kidney, fetal, 19-23 w, M/F, Ig cDNA |
| KIDNNOT09 | 3,749 | kidney, fetal, 23 wM |
| KIDNFEP0I | 1,105 | kidney, fetal, TIGR |
| KIDNNOC0I | 5,080 | kidney, right/left, aw/Patau's, fetal, 20 wM, |
| | | pool, Ig cDNA |
| | 83,602 | Total number of clones |
| | 23,599 | Number of LifeSeq Gene Bins with one or |
| | | more clones from the above libraries |

[2026] The “Transcript Imaging” software of the LifeSeq Gold database was then used to identify all LifeSeq Gold database gene bins that contain one or more clones from the selected kidney tumor and fetal kidney libraries. The output of the Transcript Imaging software includes a list of these gene bins as well as, for each gene bin, information regarding the total number of tumor kidney and fetal kidney clones within each gene bin (“absolute number”), the number of different libraries that gave rise to these kidney clones, and “percent specificity” which is the % of clones within the gene bin that came from the kidney tumor and fetal kidney libraries. Thus, a gene bin with 100% specificity contains only clones from the 19 kidney tumor and fetal kidney libraries, while a percentage less than 100 reflects the percentage of clones within that gene bin that were derived from the kidney tumor and fetal kidney libraries. In analysis of the gene bins identified by the Transcript Imaging software, the bins were sorted based on descending order of “percent specificity,” then sorted based on descending order of “absolute number.” By doing this, gene bins that had the greatest number of kidney tumor and fetal kidney clones as well as relatively high percent specificity were identified (Table 8).

TABLE 8
LIFESEQ PROFILES FOR KIDNEY ANTIGENS

| Antigen | | Gene | | Abs. | |
|---|---|---|---|---|---|
| Name | Gene Bin ID | Description | Found In | Abund | % Spec |
| K1102C | 985271 | Incyte Unique | 1 | 5 | 81.62 |
| K1101C | 103552 | Incyte Unique | 3 | 4 | 78.04 |
| K1100C | 341942 | Incyte Unique | 2 | 4 | 78.04 |

[2027] The DNA sequences that made up the gene bins identified in this manner were then extracted from the LifeSeq Gold database and analyzed by BlastN sequence similarity searching as well as by quantitative real time PCR. Here we are disclosing the sequences for three sequences derived from gene bins that were identified by the Transcript Imaging software as described above. None of the three sequences showed significant similarity to known genes in GenBank or GeneSeq databases. However, the BlastN vs. GenBank nonredundant DNA database showed that K1100C (SEQ ID NO:1844) is located on Chromosome 7, K1101 C (SEQ ID NO:1845) is located on Chromosome 2, and K1102C (SEQ ID NO:1846) is located on Chromosome 13.

[2028] mRNA expression profiles for K1100C, K1101C, and K1102C were then determined using real-time PCR analysis on a panel of kidney tumor, normal kidney, and a variety of other normal tissues, as described in Example 3. K100C was shown to be highly over expressed (from 50-725 copies of K1100C/copy relative to bone marrow) in 66% of kidney tumor samples as compared to normal kidney and a panel of other normal tissues. Moderate over expression (about 25 copies of K1100C/copy relative to bone marrow) was observed in an additional kidney tumor sample, normal bladder, and normal lung. Lower levels of expression were also seen in normal breast, brain, and esophagus. K1101C was over expressed in 66% kidney tumor samples (2500-35000 copies K1101C/copy relative to activated PBMC) and in normal kidney. Over expression was also observed in stomach tumors and normal stomach. Lower levels of expression were seen in normal thyroid, colon, and heart. K1102C was over expressed in 77% kidney tumor samples as compared to normal kidney. Expression was also seen in normal esophagus. No expression was seen in any other normal tissue tested.

[2029] Thus, K1100C, K1101 C, and K1102C are over expressed in kidney (renal) tumors and provide candidates to which therapeutic monoclonal antibodies (naked or conjugated to toxins or radioisotopes) may be targeted. In addition these candidates may also be targets for therapeutic T-cell vaccines and can be used as diagnostic markers for the detection and monitoring of kidney (renal) malignancy.

### Example 5

### Extended cDNA Sequences and Open Reading Frames Identified for Kidney Tumor Antigens

[2030] Disclosed herein are the open reading frames for the previously disclosed kidney tumor antigens K1548P, K1549P, K1550P, and K1551 P (full-length cDNAs set forth in SEQ ID NOs:1702, 1693, 1764, and 1769, respectively). The protein coding sequences or open reading frames (ORFs) are set forth in SEQ ID NOs:1859-1862. The amino acid sequence of the ORFs are set forth in SEQ ID NOs:1848, 1849, 1863, and 1850, respectively. These kidney tumor antigens were shown by microarray and real time PCR analysis to be over expressed in kidney tumors as compared to normal kidney and a panel of other normal tissues. Searches against GenBank showed that K1548P has some similarity to ESM-1 and K1549P has some similarity to FABP7 (see Table 6). K1550P and K1551 P showed no significant similarity to known sequences in the database (see Table 6).

[2031] Additionally, the K1551 P cDNA sequence (SEQ ID NO:1769) was used as a query in a BlastN search of the GeneSeq DNA database and was found to share 100% identity to a longer cDNA sequence, GeneSeq Accession AAA16627. This DNA sequence encodes a 653 amino acid sequence (GeneSeq Accession AAY94907). The extended cDNA and protein sequences are disclosed herein in SEQ ID NOs:1847 and 1851, respectively. These may represent full-length sequences or alternative splice forms.

### Example 6

### Extended DNA and Protein Sequences Identified for Kidney Tumor Antigen, K1622P

[2032] This Example describes the identification of extended DNA and protein sequences for the kidney tumor antigen K1622P. This kidney tumor antigen was shown to be over expressed in kidney tumor as compared to normal kidney and a panel of other normal tissues.

[2033] SEQ ID NOs:1768 and 1580, encoding the K1622P kidney tumor antigen, were used as queries in Blast searches of public databases (including GenBank, GeneSeq DNA and protein databases, and High Throughput Gene Sequence database (HTGS)). This analysis identified an additional nucleotide sequence for K1622P (set forth in SEQ ID NO:1852) with a potential open reading frame that encodes a predicted transmembrane protein, semaphorin 5B (SEMA5b/SEMAG/SEMG), represented by accession # AB040878. This molecule contains a sema domain, seven thrombospondin repeats (type 1 and type 1-like), a transmembrane domain (TM) and a short cytoplasmic domain. An open reading frame (ORF) was identified (set forth in SEQ ID NO:1853) that encoded a protein (SEQ ID NO:1856). No in-frame “stop” codon was observed upstream of the most 5′-starting methionine, indicating that K1622P may contain additional 5′-nucleotide and corresponding amino-terminal protein sequence. Consequently, the protein sequence set forth in SEQ ID NO:1856 does not start with a methionine (met) and includes the largest predictable K1622P polypeptide encoded by this ORF. The first identified methionine encoding codon (gtctcftggATGC) was at nucleotide +154 of SEQ ID NO:1852, resulting in an ORF (set forth in SEQ ID NO:1854) that encodes a protein originating at this starting methionine (set forth in SEQ ID NO:1857). A second methionine encoding codon (gggcctatcATGG) was identified at nucleotide +328 of SEQ ID NO:1852, resulting in a shorter ORF (set forth in SEQ ID NO:1855) that encodes the protein set forth in SEQ ID NO:1858. This protein utilizes a starting methionine in a context that conforms better to the Kozak start of translation consensus sequence (gccgcca/gccATGG) and therefore may represent a polypeptide translated in vivo. Additional Blast analysis mapped K1622P to human chromosome 3 (accession #s AC078794, AC092975, AC084300, and AC083797) where it is encoded by at least 23 exons.

### Example 7

### Peptide Priming of T-Helper Lines

[2034] Generation of CD4⁺ T helper lines and identification of peptide epitopes derived from tumor-specific antigens that are capable of being recognized by CD4⁺ T cells in the context of HLA class II molecules, is carried out as follows:

[2035] Fifteen-mer peptides overlapping by 10 amino acids, derived from a tumor-specific antigen, are generated using standard procedures. Dendritic cells (DC) are derived from PBMC of a normal donor using GM-CSF and IL-4 by standard protocols. CD4⁺ T cells are generated from the same donor as the DC using MACS beads (Miltenyi Biotec, Auburn, Calif.) and negative selection. DC are pulsed overnight with pools of the 15-mer peptides, with each peptide at a final concentration of 0.25 μg/ml. Pulsed DC are washed and plated at 1×10⁴ cells/well of 96-well V-bottom plates and purified CD4⁺ T cells are added at 1×10⁵/well. Cultures are supplemented with 60 ng/ml IL-6 and 10 ng/ml IL-12 and incubated at 37° C. Cultures are restimulated as above on a weekly basis using DC generated and pulsed as above as antigen presenting cells, supplemented with 5 ng/ml IL-7 and 10 U/ml IL-2. Following 4 in vitro stimulation cycles, resulting CD4⁺ T cell lines (each line corresponding to one well) are tested for specific proliferation and cytokine production in response to the stimulating pools of peptide with an irrelevant pool of peptides used as a control.

### Example 8

### Generation of Tumor-Specific CTL Lines Using in vitro Whole-Gene Priming

[2036] Using in vitro whole-gene priming with tumor antigen-vaccinia infected DC (see, for example, Yee et al, The Journal of Immunology, 157(9):4079-86, 1996), human CTL lines are derived that specifically recognize autologous fibroblasts transduced with a specific tumor antigen, as determined by interferon-γ ELISPOT analysis. Specifically, dendritic cells (DC) are differentiated from monocyte cultures derived from PBMC of normal human donors by growing for five days in RPMI medium containing 10% human serum, 50 ng/ml human GM-CSF and 30 ng/ml human IL-4. Following culture, DC are infected overnight with tumor antigen-recombinant vaccinia virus at a multiplicity of infection (M.O.I) of five, and matured overnight by the addition of 3 μg/ml CD40 ligand. Virus is then inactivated by UV irradiation. CD8⁺ T cells are isolated using a magnetic bead system, and priming cultures are initiated using standard culture techniques. Cultures are restimulated every 7-10 days using autologous primary fibroblasts retrovirally transduced with previously identified tumor antigens. Following four stimulation cycles, CD8⁺ T cell lines are identified that specifically produce interferon-γ when stimulated with tumor antigen-transduced autologous fibroblasts. Using a panel of HLA-mismatched B-LCL lines transduced with a vector expressing a tumor antigen, and measuring interferon-γ production by the CTL lines in an ELISPOT assay, the HLA restriction of the CTL lines is determined.

### Example 9

### Generation and Characterization of Anti-Tumor Antigen Monoclonal Antibodies

[2037] Mouse monoclonal antibodies are raised against E. coli derived tumor antigen proteins as follows: Mice are immunized with Complete Freund's Adjuvant (CFA) containing 50 μg recombinant tumor protein, followed by a subsequent intraperitoneal boost with Incomplete Freund's Adjuvant (IFA) containing 10 μg recombinant protein. Three days prior to removal of the spleens, the mice are immunized intravenously with approximately 50%g of soluble recombinant protein. The spleen of a mouse with a positive titer to the tumor antigen is removed, and a single-cell suspension made and used for fusion to SP2/O myeloma cells to generate B cell hybridomas. The supernatants from the hybrid clones are tested by ELISA for specificity to recombinant tumor protein, and epitope mapped using peptides that spanned the entire tumor protein sequence. The mAbs are also tested by flow cytometry for their ability to detect tumor protein on the surface of cells stably transfected with the cDNA encoding the tumor protein.

### Example 10

### Synthesis of Polypeptides

[2038] Polypeptides are synthesized on a Perkin Elmer/Applied Biosystems Division 430A peptide synthesizer using FMOC chemistry with HPTU (O-Benzotriazole-N,N,N′,N′-tetramethyluronium hexafluorophosphate) activation. A Gly-Cys-Gly sequence is attached to the amino terminus of the peptide to provide a method of conjugation, binding to an immobilized surface, or labeling of the peptide. Cleavage of the peptides from the solid support is carried out using the following cleavage mixture: trifluoroacetic acid:ethanedithiol:thioanisole:water:phenol (40:1:2:2:3). After cleaving for 2 hours, the peptides are precipitated in cold methyl-t-butyl-ether. The peptide pellets are then dissolved in water containing 0.1% trifluoroacetic acid (TFA) and lyophilized prior to purification by C18 reverse phase HPLC. A gradient of 0%-60% acetonitrile (containing 0.1% TFA) in water (containing 0.1% TFA) is used to elute the peptides. Following lyophilization of the pure fractions, the peptides are characterized using electrospray or other types of mass spectrometry and by amino acid analysis.

[2039] From the foregoing it will be appreciated that, although specific embodiments of the invention have been described herein for purposes of illustration, various modifications may be made without deviating from the spirit and scope of the invention. Accordingly, the invention is not limited except as by the appended claims.

The application's sequence listing, which the Patent Office published only in electronic form, follows.

SEQUENCE LISTING (1863 sequences)

SEQ ID NO: 1 - DNA, 404 bp, Homo sapiens
ctgattataaacctaagaaaattaaaacagaagataccaagaaggagaagaaaagaaaactagaagaagaagaggatggtaaattgaaaaaacccaagaataaagataaagataaaaaagttcctgagccagataacaagaaaaagaagccgaagaaagaagaggaacagaagtggaaatggtgggaagaagagcgctatcctgaaggcatcaagtggaaattcctagaacataaaggtccagtatttgccccaccatatgagcctcttccagagaatgtcaagttttattatgatggtaaagtcatgaagctgagccccaaagcagaggaagtagctacgttctttgcaaaaatgctcgaccatgaatatactaccaaggaaatatttaggaaaaatttcttt

SEQ ID NO: 2 - DNA, 153 bp, Homo sapiens
aaaatttgattccatgaattgtctgctcctatttgagccacaggtcttcgttgctaagaaacatatcaaacttacttaataaaaaacattaaaatgacaatttaataattttcaattattaatacttattgcaagagaaaaatgtacacaact

SEQ ID NO: 3 - DNA, 670 bp, Homo sapiens
ctggaaggccctggcctgacttcaccacttgatgtccaggctgtgtgtgccacgctcctggctctggtacgtggtatgcagcacctctcgggccttgggggagttgatcccctccagccactcctggtacagctcctgcacgtgtgcactggactccggacgccgcacagggatgtcagcgtaaatgccttccatctgccgcagcagggccttatccgcatgtccgtctggagtctgggcttggcctctgccatttaagcatcctccagcacaggcgaggacctccacaaagtggaatgggaacttgcccttcttaagcttcaggatcatgttctggatgtttcgaaagccataggctgcagcaaagcgtaacaccacctctccgttcttctcaagggtgacctcttggaagtctttgtttctcagggctcggtaagtgacctcctccacatcctcgttgaacagctccttggccgcatgtctgaagatgtgtgccaggtgcccgtctgagctggctccatcatgacgcgtcactttgtcctccttcaagtctccaaacctcacaaggcagagaaaatacaagtccttcatgaatgctgacgtacagtgacagaaagagtgaaaccagacttcctgagggcatcacaatccaagttcgaaaacagtatca

SEQ ID NO: 4 - DNA, 541 bp, Homo sapiens
ctgccctgctcaggctgggcacgacgaatgctcccaggagaggggaggcggcccacccgactgtgtaccgtggactgtggacagtgcagtgcctgctctcctgtgctatctagaaacaccttggagagagggttctgggatattctctcatgtcatctggctgaagacaccagcttgacagttcccctttaagaagcattccatacgtttgtaccagggagaaagaagcccacgcacgaattttcaggatgttttgtgaccaaacccaataactgccacacaaatagaccctaggtgggggctggcttaaataggaccacatttcccgttgctttttcagtagatgtgttataccgtcatttcaatttgaaagtttatttttttccattgatttttatacatccagaataacacaaataaccaacagttctttttctttttttgcacattcatttcccctagaacaaaaaaagtgaacttaaaaaaaattggaaccatgctattagctgtttacaaaagtgaataagaagtagctcatttt

SEQ ID NO: 5 - DNA, 380 bp, Homo sapiens
  misc_feature 277, 366: n = A,T,C or G
aaatgtgtgcaaatattttcaaatgtacatgatttgattttttaatttgttaaaactcatatacaatactggaatcttatcctataggttaaaaatataacaaaaggcagctttaatttcaagtgaaattttcattgataatacaaaactaaaattatgcttactattcacaaaatacatagaagagacagtattcccgcagtttgctgacttatgtcatcacaaatgaacccagaatttacaaactctagccttgttgtaaaacgtaactttggcntttccttcaaaaaagtgagcagtgcatatttcctttattgaacaaaggtattcattcattttctgcaagactattacattcactctttntttttttttttttt

SEQ ID NO: 6 - DNA, 186 bp, Homo sapiens
tctacatcacgacaatctcatcatattatttctataacttttcaaggacttgcgatggatggttagtgggatatctggaaattaatttgataatgacttgtgtatctacttagtattgcaatgtaagttactcaattcaccaatgtatttcaacaattaaaacatttttatccctcttcaaaaaaa

SEQ ID NO: 7 - DNA, 359 bp, Homo sapiens
aaagacaaaaaaattcttttatgtacaatatcttgtctagagtctagcaaatatagtacctttcattgcaggatttctgcttaatataacaagcaaaaacaaacaactgaaaaaatataaaccaaagcaaaccaaaccccccgctcaactacaaatgtcaatattgaatgaagcattaaaagacaaacataaagtaacttcagcttttatctagcaatgcagaatgaatactaaaattagtggcaaaaaaacaaacaacaaacaacaaacaaaacaaaacaaacaaacaaaaaatcccaccaatcttcatgggtaaactttcctgctcagggatgtaagctgactctagaccatctcgc

SEQ ID NO: 8 - DNA, 456 bp, Homo sapiens
ggaacgtgaactcagtagctgaacctgtctgacccggtcacgttcttggatcctcagaactctttgctcttgtcggggtgggggtgggaactcacgtggggagcggtggctgagaaaatgtaaggattctggaatacatattccatgggactttccttccctctcctgcttcctcttttcctgctccctaacctttcgccgaatggggcagcaccactgacgtttctgggcggccagtgcggctgccaggttcctgtactactgccttgtacttttcattttggctcaccgtggattttctcataggaagtttggtcagagtgaattgaatattgtaagtcagccactgggacccgaggatttctgggaccccgcagttgggaggaggaagtagtccagccttccaggtggcgtgagaggcaatgactcgttacctgccgcccatcaccttggagg

SEQ ID NO: 9 - DNA, 284 bp, Homo sapiens
aaaagccagaacataacaaatctcactttctggaaagtcatcttattagaaatacaagaagtgcacttaatacaaggaagtaagtttctcggtgccaccagtgaggtggacatacactcacatcagtccctcaaacgaaggtttcgccagatttccctccagacttctgagatgatctggattcaggaaggtctgagtgaacttcttccagaaattacagtgaacaagctgaccttaacttttgggtcctcccgagaaatactaatgaaaaaactattgttttc

SEQ ID NO: 10 - DNA, 469 bp, Homo sapiens
  misc_feature 32, 33, 461: n = A,T,C or G
ttagattgtattgtgtattttcggttaaatgnnaattgaatgtaaatatttagatgcagcaccatattttataacccagctttagcatttcttcatattttaaggaaaccccccacctccttcttttaagggcgcttcttgctctctgaaatgccctgctaaatgcttctcttaattatttgaataaggtagtttggaataaagaaagaaaagatcactctacatacagatagtaaacttaatttgtgatcctatatatgagacagtataaaaatacagataagttttagaaagactcaaaacaatatgtaaatgactgatgtttgcattattaaggaaaacttgggatgttgggtcaagaggggaaagtgttagtcaatccactttggagcaatatcatgaaggtcaattataattccatatacctttctttgatgccacagtcagagatagaatacagnttgggtgg

SEQ ID NO: 11 - DNA, 138 bp, Homo sapiens
tcaacaatatactaatatattttggaaaccactaaatgtcaagcattatccatacagggtattaacacattaatgttttcattaaaaaagaaagatctctttcttcatcacattacacatttatagagtagagatctg

SEQ ID NO: 12 - DNA, 362 bp, Homo sapiens
  misc_feature 32: n = A,T,C or G
aaacactgttataacctgttttacagaaatgnttgtaaacaaaatatattttgtgactaagaattccaaagtacaaccaaaacaacgtccttagtatcttaaggtttaagatttccgaaaagaaaaaagcccccccaaaacaacagtggcactacaaactgtgttctattctttcaaaacacagacactgcttatactatatccaaaacaaattagcacctgtttgctgttgctccccatataacttaacattgtgaagcatggtaattaaaaaaaatcagctttcatatctattcagtctctgttgaatgtatagagtaataattccaccccctgccatttttacaattaaaacacaattt

SEQ ID NO: 13 - DNA, 256 bp, Homo sapiens
  misc_feature 247: n = A,T,C or G
cctggtccccaagagctttggaggcttggattcctgggcctggcccaggtggctgtttccctgaggaccagaactgctcattttagcttgagtgatggcttcaggggttggaagttcagcccaaactgaagggggccatgccttgtccagcactgttctgtcagtctcccccaggggtggggggtatggggaccattcattccctggcattaatcccttagagggaataataaagctttttatttcncaaaaaaaa

SEQ ID NO: 14 - DNA, 467 bp, Homo sapiens
ctgttggaggatcaggcaaaggaggactctggaaagggttaagaaactcatcaataaccatgccatggttccacatgagacactaatcatatcacaagggctgcaactgtcactgatatactaggtcaagaaaagatctactttccagaaacttcaaagcatgtatgtaatatacaaagatcagtaagaccacagaaaaaataatacaccaaccagaaaataacaatgactctttataaacttgtatggggtctaaattatcccttgtaatatatatgtgtgtattcattccacagagaattagatgatccgcctccaggtaacctgctgggaatttcttgagattttggctccccttgaatggccgcatccaacttgttttgttagaactcccagcatcacagcgatggcagctctcttagattccccatacatccacgacctatatcatgtccaataaatcgtcc

SEQ ID NO: 15 - DNA, 380 bp, Homo sapiens
aaaaatctaaggtaagactacaaagcagcataacaggttttctgtcacttgtaaactggattagaaggcaatccccagaattccagaaccgttgtggagatatgatttttaatttacaatctagaaaaactgcattcaacaagtagtccaaggatttgggttctagttgccagcttgcatggtacaatcttgagtaagtctctcaacttctggatataggaaatcaaaggccccccaacagaatgaaaggtgttaaatcaggtcatcttgaatattcttcccagctctgttattttacaacgccatgaaatcagagtaacatgttccaggctgtttggggtttgggattttagaacctgatgcaatgtatagcacttttt

SEQ ID NO: 16 - DNA, 248 bp, Homo sapiens
cagaaatgtcttatctctaaaaatttttagtagtaattatttaccaaacttaaaaacatttctataaatataaagcttttctttatatttaagacaaaatataaaggctagaatttggttccttctctgtaacactaaatattttagtgtgaaattgaatttttttattactatagtcttttcaatctataatttgtgtttttaatttcttgatatgtcacttctgttcctccctgcttgcatttttt

SEQ ID NO: 17 - DNA, 358 bp, Homo sapiens
aaatatcacaagtaggtcttaagtgtcatctggcatcttctttctgtagccaggtaactcttagatcttattcatcagcctgctgaacagttcctttttcagagacatagataccatccaaaaatttcctgatatccttgtttttaactgttgtggcttgctgaatcaaagccgctgaatttgaaacaagctcaatgtcatttccttcaaggattaattcatctttctgggcttgagatactgaacaagcaacacctggtctcatccgaaccctgcggatgtatttttcacccaagaaatttcggatttcaacaagagacccattctcctggataacaacgttgatggggaagtgagc

SEQ ID NO: 18 - DNA, 237 bp, Homo sapiens
ctggaaactaatctccgtgttcttgaatgtgctgagagtcctgatgaccactttgtctccttcttgactgataattaccgttggtttggtcacatttcccacctgcctagtggcaaagcccacgcctagagccttcatgtactcatcaaagttctgactgttggtcagcttccaggtagcacagaaagcctccaccatccttgccctttcccctctttagagacaggagcggggatc

SEQ ID NO: 19 - DNA, 464 bp, Homo sapiens
gtaacagccctgtgagacagacaatattatccttattgtacagatgggggggctctggaggctctgaaaagtttttggtgatattcccctaagtttataccacaaaatgatggagccagaatttagttgcagaacttctgactccaagtccagagttctttactagacatctggtttcttactagctttttgctagctttttattttacagtgaaaagtatggaagcaaatcctgataattttggcttattatcaaatatcatttattttttattgcagagacccagcagatgtaactctcattgtagccatcccaaagaaaacccttctttgccctttgcagtgccacttatttaggtaactgaagtgtatttccagtacaatttgattttgaactaagatttgatatagagttgtaattgcttacataactctttgaaaatgtatcatccctgggttctcag

SEQ ID NO: 20 - DNA, 376 bp, Homo sapiens
aaatatgatgacatgtttcttatcttctaaacttcaacgaaagctgcttgtacaaactatttaatgcatatctgccccattaaacaagatatttgatgtagcagagaagccagaagctgagtcacttcatttctttctgttgcctccagttgccagcatagttgcaactcgcataaatatatttaatgtatccatgtagatactcagcatcgagttaatgggatcatatttttgaactccatacattggtgatacttctgcacgcttgattactttctgggtatcatacagaaggaacatgctgaaaagaactaatccaccgtacattgccactgagtaaagagtggcaccagccacggtggtaggtggaagaaac

SEQ ID NO: 21 - DNA, 506 bp, Homo sapiens
ttcttctagaattaattacttttatcttttgtcttcatttgtggctgcagaatcctgccccttccaccccaaggggcacggcccggagatgaagcttattttaggatcacaagtgcacgctctggtagacggaggatgactttgtcagtcttctggctgaagggccttgtccaaagtcaggatcagaaataggtcagctcatcatgcttggctttgttggtctggtagttagataaggtcaagggcttgttttcatgagggagagattggaacactcgcaggtgtacgaagtcctcgtcgccgacgtgcaccttgatgaagtagtttgtccccgcgaccacctggctcttgaatgacacggccttaaacacagggaacttcttgttttctttctcttcaagctgggacctcacctggtcggcgatgtgccgggtctcggcggtggccggctgcgtggcggagggcgccccgcacatcatcttggcggcgacggagggaatctggcg

SEQ ID NO: 22 - DNA, 272 bp, Homo sapiens
  misc_feature 31, 152, 261, 262, 268: n = A,T,C or G
ctgccatcatgatgatgcggtgtgccagatncgtcccccgcttctgcgccgaccaccccttccttttcttcatccagcacagcaagaccaacgggattctcttctgcggccgcttttcctctccgtgaggacagggcagtcttggtgtgcancccctctcctctctgtcccctgacactccacagtgtgcctgcaacccaagtggccttatccgtgcagtggtggcagttcagaaataaagggcccatttgtgggatgccnnattcanaaaa

SEQ ID NO: 23 - DNA, 220 bp, Homo sapiens
ccatcagtggttgtctccataagtcattttgcgttattaaaaaaaaaaaaaaaagaaatcctgatgttgacattatagcacactgctttctccacagagatgctgatatcaaaaacttgaagatacagtgaagttctgaataatgttacaaaactggttacctgtatcaaagacccatttatgcaaaaatgttaaaaaaaaaaaaaacacccaaaacaaa

SEQ ID NO: 24 - DNA, 248 bp, Homo sapiens
  misc_feature 34: n = A,T,C or G
ctgccacattagggtgtcttccaggctctgctgnaggaactgaggatgctgaagggcagggctgatcccttcgccccctctgaagtttaggccattgcctggatgtgcttttcgttggggaagatgccataggctccttcctcctttccagagagagggacacagtgagagggctggaggccctgaaagccttcagtgcccacggtaaggaagccagccaagagaattccctctctagaaagaaggcc

SEQ ID NO: 25 - DNA, 293 bp, Homo sapiens
ctgtggaatgttgccctccattctaaggaatgcaaaacaaatctaaatgatcttctccctgaacaagaataaccactggctcatgtatcaggggtgggaggttggggctgtggaggagaggcagaaagcagaactaaagccttcaaaaaccatgatgcccaacgtttgctgaaatatttttgtctgtaaagccaggagattttgtcgcctgcttttgctgcacattaagaggatgctagaaaaatcaagcttgtttgcttctgcattcaaagctttctagatgcaccaacttt

SEQ ID NO: 26 - DNA, 441 bp, Homo sapiens
ccgccatcttccagtaattcgccaaaatgacgaacacaaagggaaagaggagaggcacccgatatatgttctctaggccatcagtgggctccggtccgaggatgaggctgattattactgtgcagcatgggatgacagcctgagtggttgggcgttcggcggagggaccaagctgaccgtcgtaggtcagcccaaggctgccccctcggtcactctgttcccgccctcctctgaggagcttcaagccaacaaggccacactggtgtgtctcataagtgacttctacccgggagccgtgacagtggcctggaaggcagatagcagccccgtcaaggcgggagtggagaccaccacaccctccaaacaaagcaacaacaagtacgcggccagcagctacctgagcctgacgcctgagcagtggaagtcccacaaaagctacag

SEQ ID NO: 27 - DNA, 389 bp, Homo sapiens
cctccggtcagcctcactctgactgcaaccccctctcactggacagcatcacctggacacagagcctcacctagtctgtgtcccatggtcacaactttgctttggacagtgacaccaagaatactcacccctttacttagccagaccacaggcagccacctggacacaaacatctctccagagtcaccctccacacagactccacagcagaactcccagggaggcactggggcatggcttcagagcaccaggcagcgctccgcggtgcctagcacccgctcagccagggcagcctgcagcggagcttggagccagcagcttctcatctcttggcctcgggaaatgtagctggagtcatcatttagcagagcacggtgtccctgggttgg

SEQ ID NO: 28 - DNA, 282 bp, Homo sapiens
aaaaagatgtcacatatgaactggggaactttagcaccaaaatcaagtctctcctagtccatctagcttccccttcctccccacttaaaaaaaagaaaaaattaaatcacaaagtcccacttaagtcaaaatcttcgtccgctttttcagccttccttcctgcagacctacacaaacccaggcaagattagtcaacaggggttcagatcgggaagaaaaaggttttgaatgtcaagacaggtttcccccaaaaccctggtctggcaacaactcttccaaggg

SEQ ID NO: 29 - DNA, 474 bp, Homo sapiens
aggaaaccaagtggtcaggagttgtttctgacccactgatctctactaccacaaggaaaatagtttaggagaaaccagcttttactgtttttgaaaaattacagcttcaccctgtcaagttaacaaggaatgcctgtgccaataaaaggtttctccaacttgaagtctactctgatgggatctcagatcctttgtcactgcctatagacttgtagctgctgtctctctttgtccctgcagagaatcacgtcctggaactgcatgttcttgcgactcttgggacttcatcttaacttctcgctgccccagccatgttttcaaccatggcatccctcccccaattagttccctgtcatcctcgtcaaccttctctgtaagtgcctggtaagcttgcccttgcttaagaactcaaaacatagctgtgctctatttttttgttgttgttgtgactgacggagtgagattccgtctccc

SEQ ID NO: 30 - DNA, 527 bp, Homo sapiens
ctgcaccttctggcccatctgctgttcatagtgggcaatagccttttccactgcggctgagttctctatctgggccaaggccaggactgcgttctccatgcagggtagatccccactgccgatggcattgacgtaggtcagcaccaggctctctagacgaggcccgttgactgcaatgccacctgaaagagtcttgacattggaatggctgaggatgtaggaacaaaattctgcaacttgttctatgaaatcagggttcagctcttcctcctttagctgctctaggtgagcaaggtacttcttaggagcgggccaatcgaagacgaagcacttcctcttggggaagaactttcggatgcacaaccgaggatcattaaagcttttacttttcttatcagtaccttttcttagctttagcgaaagctccaagtagtcatcagcagtgatgggttctccatctacttccagttccagggtgaaatctctgagagtccacacaaatgctggaaaaaagctcacaaagtcag

SEQ ID NO: 31 - DNA, 454 bp, Homo sapiens
aaaatttttagttttcagttttccccatttgttcctttataaatgtaaaattgtgcatctgatgtctctttcctcaaataagtgtgttctaaaaatacctactgagtgaaatggtaaaaaccagatgatggaaagagaaacacaacatccgtttcatcaattttacctgatttttctcaaaccagccttttttttttgcttatttttagtttgaaatataaataactacaacaatgcatatttcagttgccttcattcttaaattctgaataagcatcttacttttctataaaacattacagaaactcaaaataataatcaatggcttctccaattccaaatattcaacttaatggagacagcatcttttacatttaatgaaaacagaggatttggaacaccgttctatgcagacatgggtttactatagatttgctggtaccttattttttta

SEQ ID NO: 32 - DNA, 573 bp, Homo sapiens
  misc_feature 556, 557: n = A,T,C or G
ctcacagtgacatagtcgcgactggaaccaaggtctccatatgcaattatcctattcatggtctacctgctttattagatctgtaattgaatattcaatgatttggatttggcatgcccaaattccagtgttttaatcccttttcaaccattacctcacgtttagtttagaagtatcacttgatatctgatttcaatagagtaatggaattttagctttatccaattacagcatttatgctttccagatattttttggactaaataattctcattctgtataaatgtgcatagccctcatcattagtcatgtattgtgttagcacctttgtgtactgcatgtgtattcattactaagcactattgtagatgttgaaaatagagcagtgaataagagagatagatgacaaataaatatacaaacaaataagataatctaagtcagtttcccattactggattggatttctattttaacacttatttctgagtacttgtggggtgataccaacattaaatgttttgaggaagctcctttgagatggctttgaaaagcnnctaagtgagaaaattt

SEQ ID NO: 33 - DNA, 267 bp, Homo sapiens
ccagcttagccctgttgcagaggcaatttgatgtggacattcttatctcgggacacacacacaaatttgaagcatttgagcatgaaaataaattctacattaatccaggttctgccactggggcatataatgccttggaaacaaacattattccatcatttgtgttgatggatatccaggcttctacagtggtcacctatgtgtatcagctaattggagatgatgtgaaagtagaacgaatcgaatacaaaaaaccttaaagccagg

SEQ ID NO: 34 - DNA, 134 bp, Homo sapiens
aaacttgatccaacctctttgcatcttacaaagttaaacagctaaaagaagtaaaataagaaggcaatgcttgtggaatgtacagtgcatattggcggcgcacgcctcattacgattcgcctgcttgcttctcc

SEQ ID NO: 35 - DNA, 246 bp, Homo sapiens
aaaagctatgttaaatatacacaaaatgaatttctatattaataagtgcaaatgtatattttcttataatttagaattaaagtactttatactcaatattcttaataaaatttatgtaccatacttgtcattgcgtagacttcttatcaaaatttcacatttatctgtaggaaaatgtaaagttggtaaaaattgtttacacaaatcacacattttccatccttgacaattgcagtgttttttttt

SEQ ID NO: 36 - DNA, 483 bp, Homo sapiens
  misc_feature 64, 100, 111, 120, 148, 163, 298, 327, 338, 430, 455, 462,471: n = A,T,C or G
aagcttttttttttttttttttttttttttttttgacataattttttattatgtatcaaattgncttcaatataagttacaacttgattaaagttgatanacatttgtatntatttaaanacaaaaaaattcttttatgtacaatatnttgtctaaagtctancaaatatagtacctttcattgcaggatttctgcttaatataacaagcaaaaacaaacaactgaaaaaatataaaccaaagcaaaccaaaccccccgctcaactacaaatgtcaatattgaatgaagcattaaaanacaaacataaagtaacttcagcttttatntagcaatgcanaatgaatactaaaattaggggcaaaaaaacaaacaacaaacaacaaacaaaacaaaacaaacaaacaaaaaatcccaccaatcttcatgggnaaactttcctgctcagggatgtaanctgactntaaaccatntcgcggttcctg

SEQ ID NO: 37 - DNA, 347 bp, Homo sapiens
aaaccatggaaaactgaatgggataaagtggcactacttcaaagggcccagttactccttacgttccacaactatgatgattcgacctttagatttttgaaagcgcaatgtcagaagcgattatgaaagcaacaaagaaatccggagaagctgccaggtgagaaactgtttgaaaacttcagaagcaaacaatattgtctcccttccagcaataagtggtagttatgtgaagtcaccaaggttcttgaccgtgaatctggagccgtttgagttcacaagagtctctacttggggtgacagtgctcacgtggctcgactatagaaaactccactgactgtcgggcttt

SEQ ID NO: 38 - DNA, 522 bp, Homo sapiens
  misc_feature 522: n = A,T,C or G
aaatgctttgaagactgatacactcaaccatctatattcatgagctctcaatttcatggcaggccatagttctacctatctgagaagcaaatccctgtggagactataccactattttttctgagattaatgtactcttggagcccgctactgtcgttattgatcacatctgtgtgaagccaaagccccgtggttgcccatgagaagtgtccttgttcattttcacccaaatgaagtgtgaacgtgatgttttcggatgcaaactcagctcagggattcattttgtgtcttagttttatatgcatccttatttttaatacacctgcttcacgtccctatgttgggaagtccatatttgtctgcttttcttgtagcatcatttccttacaatactgtccggtggacaaaacgacaattgatatgtttttctgatataattactttagctgcactaacagtacaatgcttgttaatggttaatataggcagggcgaatactactttgtaacttttacctccggn

SEQ ID NO: 39 - DNA, 376 bp, Homo sapiens
cgaaaccttcaccgtgaagtcctgtcctgatgccatcaaagaggtcttcgacaataaattccacatcatcggcgcagtgggcatcggcattgccgtggtcatgatatttggcatgatcttcagtatgatcttgtgctgtgctatccgcaggaaccgcgagatggtctagagtcagcttacatccctgagcaggaaagtttacccatgaagattggtgggattttttgtttgtttgttttgttttgtttgttgtttgttgtttgtttttttgccactaattttagtattcattctacattgctagataaaagctgaagttactttatgtttgtcttttaatgcttcattcaatattgacatttgtagttgagcgggg

SEQ ID NO: 40 - DNA, 396 bp, Homo sapiens
caagagaaaaaatttttattgtgatataaaatgcacttataaaatgtccaccagaaggcatgtaattcttcactgctatataaatttactgggaatatgttattcaccatctaggtatgatactgccaactaaaacatactgtaaacgatgagttatactctataacaaatgcatcactgattttcagcaatcattggtttaataataattagtttaagactataatcacatctatattctggaatgtccatttactttaatgtagtgtagtggaatttagagtataattgcacatagatggtacagaaaaacattcacttctaaattattttataccttcatgacaggtagtcttcctgactgaaaataacagcttcagctatggtctgctccag

SEQ ID NO: 41 - DNA, 310 bp, Homo sapiens
gaggctttcaaatgtaccgatgatactgtttcttgcactgaatatataaacactccacagtgtttatattgggaagatattgggaaggaaatatatttgtaaaagatgaaggctgtatctattttttttttctttttaaagtttgttcacttaaattcttttgaggatgggatgtatttttcttgctgttcagtgctttttccttttcatctgttgttctgtggtcacagtgaccttagctacatagcagactttcccaaatgtattgattacaaataaacagttgttacttagcaagacctaaaaaaaa

SEQ ID NO: 42 - DNA, 224 bp, Homo sapiens
ctgtagaaccccaggaaagaacggaatccaggcaatctgtttagagaccccccactccaaatttatccttttcctttccttcccctaagatgtttccagggccctctggtgcccacactgtcctcttccttccacttgggggtggggaaatccttcctgcgaggtcagggcatttctctacaaagtggcctgaatgaggccaggccctgagaaggagccaccag

SEQ ID NO: 43 - DNA, 506 bp, Homo sapiens
ccacggggactgttattcgcaagctggttttctagacctgttagctggaagcatggtgagcaccatttctggacgctcaggccgtgtcgggcttcagtcatctccaccacacaggtacagcagcgctttctggtagtcgcccttagtgtcttgctggatataatagtacagggacttgccgtactttctcttgaattcagacctaattttcaacatgtccacttcactgcgggagaccatgattctgatcaggaccttatctcgcgtccccttgcccttcatggagtcatacagccgatcagcaaaatacaggggcttgttctgaatgcactgaaccaggttcaggaaagcattttccaggtctcctttaacctctttcctgatgctttccaacatgtcataagggctgtaactcttgtacctatcaaatactttctggaggtggggcaccgctccgctcggtcatgatgctgatccacttgggaacatcagttcctttcctcttc

SEQ ID NO: 44 - DNA, 306 bp, Homo sapiens
  misc_feature 10, 21, 41, 48, 93, 105, 112, 117, 127, 147, 159, 189, 206,213, 244, 270, 272, 288: n = A,T,C or G
aacaaaattnttgaacaaagncaaaatacagcagttaatgncaatgtntaacaattaaataattgaacgggattaaattaaaaataaaaggcntaaaatttgaanacaacanaaaanacaaaaactncttttgcttaattccatttntatcaaaacaanaaaaaaaaagccaatgcgttccaaccaaanatgttgaattccacacntaactgnttctcttattacttctggtctcttaaaaacncttctaagttctaaaaaaacaaaagngngcttgacaaaactatnatccatttctttctgcct

SEQ ID NO: 45 - DNA, 282 bp, Homo sapiens
cataggcctcttcagggctaagattaggccgatagccactgtccatgaccccgtaggcataagtgttcccactacccgtggagaacatatttcctgagagccgagtcccatgttcatccacgtagtagagtccaggacccttcttatcccagccacagatcatactgcccatagagaggcccatgccccggtactggcacatcatgttggacagcagcttggaggctgccgacactgaaatacgttctccatttcgcagatagtacagcctgcattccttgg

SEQ ID NO: 46 - DNA, 586 bp, Homo sapiens
  misc_feature 575, 576: n = A,T,C or G
ggatgctgttgggcatgtccaatgtatgacttcatgagttacacagatgctaattcgtaggggcacttggaatcacatggttgttttgtgtcccatggtcaagcattctatcttatcagggcctacagtaacatgccaaaagttgcttccaacatatttctctgctttggatggggcatatttctgtgctgtggatgacatggccttactccagaatcccaggccctccaccgtgactctcctactggtgcttggttcagctccaccccaaatcttaccccaccactggcactttcagcaccagggggtctgaaggatggtgactgcgccatggcctggatctgctgcagtgtcctttcctgtggaggctccactcaaagctggcatcctcctatgtcacctagagtgtgggtcaaagcaatacacctacatgtagaatgtgatgtcagaactcaaacaggctcaccaggcagtgtgcttccttccttgcatgaggatgcaagatgcaacagtttgtctttcacattggaagggacacccctggatgcccctaaccactagacctgtaaaacttnnctgcagtggg

SEQ ID NO: 47 - DNA, 275 bp, Homo sapiens
  misc_feature 34, 249: n = A,T,C or G
ctgcttttacctgaccaggctcactcttccaggnacccagaccaatcagaggcatcttctgcccagtgtgcagtagaacacaggaagccgccattgccccctttgcctggctagctgctgctcatccttcagctagcacttcacatttctggctcctttccaggtgcagtggctcatacatgtaatctcagcacctgggcaggctgaggcgggaggatcacttgaaaccttggcacaagcacagagcgngaatagggtactgtggcctgggctca

SEQ ID NO: 48 - DNA, 376 bp, Homo sapiens
  misc_feature 373, 376: n = A,T,C or G
ccacgctgacattagaagaaattagttccatattcccagaccctgaatactgcatggttaaatcaaggcaggtgggcaaaaaattacagaagtccttgcttggtggttccactgggctggggctgtaggcacttttgtaggaattgtagtcaggtccaggcaccatgcggttgggcagaaacagagcagcagcttgagaagtttccaacatctccctttctttatattctctctccagcataatgttctccaactctttatcagcaaaggctcttcttttcctcatcctgtcactaactgggggaggtagagggaaggtccctcctacataagtctccgctggaatggggcgatagccttctaaaatgctttnggn

SEQ ID NO: 49 - DNA, 331 bp, Homo sapiens
aaaatttatactgccacatgattgtaaattttagttgtcttaagttaggaattggtgaaaagctatttatgctggatttgggtcaaaatgacttatttgcaaaaaaataaataatgggaagaaagggctgtataatgaaatactgcaagactcacatattggttggaaatttccctcaaatcacctaccgattacccttgatttccctttgttttcagtttctcaaaacgaatgaaatgaaatatagcagaatgttaacccatataaaaataaagtgtacccaaatattgtaatgtatattgctgctcttcttcaaattaaataagggttt

SEQ ID NO: 50 - DNA, 308 bp, Homo sapiens
aaaggttttcctattctcgataaagcctgtgcgcactgtacggggagtgggggtgaagcgtgttctctacataggcaacacagccgcctaagtcacaaagtcagtggtcggccgcttcgaccaacatgtggtgagcattccacgggcgcatgaagtctgggtgctgtgctcgagtctctgaatattttgataggaagcgacaagaaaattcaaactgctctttgctgactactggaaagtgaaaagatgctcaagtttaccattcaaagaaaccataggcatttcaaaaacctctttctaaactttgg

SEQ ID NO: 51 - DNA, 376 bp, Homo sapiens
aaattcatacttttattattagggggtaggtaggggtcattttgttgtttatgtacacttcatattttttcaacgaaagacaaaataagattaataaaatagaaatatatgctcagtgttataaaattaaaaagtagttgttctaacacttaaggctattgcagttgctgtatttaaggaataaatttgaccttgagtttcctgacagcgaaggtaaaaatggaacatgatgttgtggttaatacagttatataacgaatcagccccaaaacttagagtaagctgaaaacaaccacttcttacgctcatgagcatagcagagataacttaatcatcctgttcacaaggtttggagctcagcaggaagattcaacag

SEQ ID NO: 52 - DNA, 479 bp, Homo sapiens
aaaaatacagaaaagtacaaaaaataagacaagatatccctataccacaatccagaatcaatcagtatcttcttatatttacttgaagtcttttgaaagagaagtggatgtttatataaaaagctgaagtcccctttaaccaatacccatcccacctcccacactcattattttcccttctccactcttcacaggtgaccactatcaagagtttggtctgtatccttccaatccgtttcaaaaacatgtacatacatatatgcatccattaccaatagatagtactgagttttatgaggaaacttttaattcaaatttacaaaaaagtcattgtactatctgtatcattctgcaacttgatcccccctcaacaattctgggatctttctgttaatacatgtggatttcatttgttgcattttacagatatatagtattacataagaatttcccatattgttcgtgatgggctttctcag

SEQ ID NO: 53 - DNA, 322 bp, Homo sapiens
aaaaaactaatgaaattcagttaataaacctattattaaactttattatgaaaggttatgaaaaaatttttagtgcttaaaattttacgatccataccatatctgccatagtaaaaattcatttttaacacagctaagatgataactcatagataccacagtaacttttttgtaggtatttaagaaaaccatttcttccttctttctccagcctaatttctatgaaaatattagtgtctaatattttacatgacccagcacaccttagtaaatgtaaacattctaaatgatttaatagcaagctttgaaagttcagatttta

SEQ ID NO: 54 - DNA, 360 bp, Homo sapiens
  misc_feature 2, 324: n = A,T,C or G
anaaataaatatgtactacggaatatctcgaaaaactgcactagagacaaagacgtgatgttaatatcttttccccacaattattacggataaacagtagcaccaataaataaatgataacaaatattaaaattaaaaaaggagagagatttagtatgtagaattctctattttttcttgttttgtttttacatataaaaaacagaatagcaatgtctattttatcagaatcacatatatacataaacatatatatatatatacacacaaatacaagttgccaaatatatatatagtatgtagatgtatattgaaaccttattncaaaggaatgtgtgctggggagccaggggatcgggg

SEQ ID NO: 55 - DNA, 219 bp, Homo sapiens
aaataaaagtgaaccatatttatctggttatataaaactaaaaatgggggtgtttatataaaactaaaaactaagaatgatgtaaccttttgtctgtgttatctgaacactctacttcctttgcagccttagtcacacaactgagtcatctcaagtactctttaaggacacacagcccaggctgttctgagtcagaataggcccctacaggtatatttt

SEQ ID NO: 56 - DNA, 321 bp, Homo sapiens
  misc_feature 2, 4, 161: n = A,T,C or G
cngnctgcttcttctcacatgacaaaaactagcccccatctcaatcatataccaaatctctccctcactaaacgtaagccttctcctcactctctcaatcttatccatcatagcaggcagttgaggtggattaaaccaaacccagctacgcaaaatcttancatactcttcaattacccacataggatgaataatagcagttctaccgtacaaccctaacataaccattcttaatttaactatttatattatcctaactactaccgcattcctactactcaacttaaactccagcaccacgaccctactactatctcgcac

SEQ ID NO: 57 - DNA, 197 bp, Homo sapiens
ctgctgtagctgctttggtggcatccttattcagtgttgcaccccaaacagcacctttatgacccaaaaatgttccaatccagtctcctgtatctccctggcgtagcataggtttaccatctttgcaagcgctgattaagaaatacccataaggcgtgatgccactgaaggccaaatcaaccacgggtcgcgtgtgg

SEQ ID NO: 58 - DNA, 191 bp, Homo sapiens
ctgaagcaatagcgcccccatttcaggcggagcatggaagccagagaggtgggtgggggagggggtccttccctggctcaggcagatgggaagatgaggaagccgctgaagacgctgtcggcctcagagccctggtaaatgtgaccctttttggggtctttttcaacccagacctggtcaccctgctgcat

SEQ ID NO: 59 - DNA, 375 bp, Homo sapiens
caattccaatttatttgttaatcagtaaaatgtaataggtgatagtgtgtccagagaatgagcctcctatgtgtaggaagacgatagtcttattacacctgctatcaattaggtcatttacatagctgctaatgtatcagaatttttttccacactgatgtagtactttattcaagtcaaaacaagttatcattatcataccaacgttgaagaattaaccattcctgaaacaagaaacaatctttacattagtatttcttggttatggtgcttagtcttggtattattaagcacaatgattcttaataaacatgggtggatgaaggcaaatgcatatagcctagtcccctcaataatttattctccatcttattt

SEQ ID NO: 60 - DNA, 598 bp, Homo sapiens
cctctctccttgagttgtcaatggctgttttctccctctgtctcacatagtctttcccctgtagaatatagaccatatcttttcattcttagttgattgtgtgattcccaaattgataaccatcaaaatcaatttagaagtttgcttttgaagaaaaaaattatgaaaaaatatccctgttattttgattcagtagatgcagtctggggctgatggttccatatttttaagaactccaggtacttataatcaggctcatcgtacttacgacaagatgatgatacagcctttcaccatctttgtaaggaaataatgggctgattttgagtggcaaaaagatgacaccagggaaaaacatgggaatggagacatttatttccattaacaaaaaatgtggtatataatatttccattggaaaagggctcctctagtacatttcatgtctctaacttccagctaggtaattaaaatgacatatttgataaattggtcaaatcagatttcagcaaaacttaggttttttgggaattggtaaaatttggaactagaagaaactgctgttgggaattatataggggaaatgtatttcattgaagg

SEQ ID NO: 61 - DNA, 607 bp, Homo sapiens
aaatgtaagttgagaaaaatttataagccaaaggttcagaaaattaaactacagaatattaaatattataatgtgcccaaagctctgaatagttaaaaattaaatatttattttcttccccaagctttaggtaaggagaagaggggtcaagagttaaacttagagaccctttgtctctgagaagcatccttctaagacattctgttggagttccctcagtactattccttacaactggagtgggtagaagccttatgaaaattatactgacaacctgatctcgtttactccatgttaatcacattcctaccaacctaaatttctgccaagtcagttctctttggaggaagcccattactccataactgactggatggtccagtgtcattttgatctgcttttcagaatggaaatttataatataaatatatgttttaataccacaaacactgtggggcacttgatatttattaagtggtgtatatggtccactggtttcaggccaaatctagaatttagtgatactggctcagaagaatttaagttctattcagctttcctgggtgttagaacctagattcaaaatggcttgtctttgctacttttg

SEQ ID NO: 62 - DNA, 337 bp, Homo sapiens
tgagaaagttgatctctagttttaaggcaggctaagcttttaaataaagataaattataagaactagtttcattcattaactattctgctattacaagttacatcatcatgttcatctccataatactagggctagcagtttggtatttaacaccaaatcctcccaatgggagacatgtactttctggctgaattacaattaacatcttattactttggaactgtataatcaggggcctgttgctctcctcattaatggaaaacagcagtccaaaatattacactctccccagtagaagtaccattattatagattcagaaaggctttgcatattca

SEQ ID NO: 63 - DNA, 611 bp, Homo sapiens
aaaccccttgtagctggcctataatatatatatattagatgttatatacagtagacttaccaagtcaatagtttaagcaatcaagccacttcactgttcagtttctttacatcatgaaatgaatacttggtattaacctcccaaatttcaagaaaatgtagaataactacagatgtatattaattagcatttaactgtccacaaatacttttggaaatcctatcatagacagtgtttcctctatataaaactgggaaaaaacaagaagtaagtccttttggtgaatatagcaaggcaatgtttagttcatttttataatgcggaaatcctgatacatggtgctttcatctttgaacttccaaaaggctataaaattggctcttctcaaatattttagaatttcatttcagctatttcctttttacgttcagaagattgggtgcagacactttcactttgccaggaatgtttcttgataaatctgtgtcctaaaaaaagaaaattgctgaatatcttcacatcctgtatggtcaatcatgtttcttttatgacaaaaacgaaaaacatttccaaacttttagctgagatggttttactgcttctaataagac

SEQ ID NO: 64 - DNA, 381 bp, Homo sapiens
ctgcaggaactgtggggaggtaagagcttaggccacgtcccaggccccagagtcctcagccccagtcttcagaggccctcagggagccctcactgggacacgggagacagtcccaccccatggcctccagtctgaagagggaggtccagcccctccctaagggagcccacagtctgtgacatctcaggtgggaggaaaaggccctgtattcagggaattccaacttgaggagagaagcccagtctgaggccagagacccagaccctaccctctctgtctcacctccaggtctggggtctgcagatgatctacaagtcagtgaagctgccagtgctcaaagtccgcagcatgctgctggagacccctcaggggcggatccag

SEQ ID NO: 65 - DNA, 600 bp, Homo sapiens
  misc_feature 289, 529, 532: n = A,T,C or G
ccattgagtttctcagggctggggccaccttgtccatagcctccgtccacgctgcctggagcaggttgttagagagctctggttgttgggtcttcctcagctcccttctgcccctctctacctcttccactcatggaagcccctctactgcttatgaagattaagggtagtattttctaaggaagtggaaagaattaaactagaaatccacaacctcagaagaagtgtttcgagtttaacatgcgctgtttctgcttatgtggttccttctctagagctgctttcccanggctttcaaaacatcaggttattgtggggcttcaggtgtaaggtcctggaagttcagcaaagtttcgtggacaagacatgggcacagagagtagaagcagaaataaatggttctatgttttcaacttccagggttggggcaggccagagcaaggcggtctcatcgaggtgggtgctacctgtgtgtgtagatgagtgtgctgaaggtggggagggcagcacacagcagctcatggcaganccncctcctaggtctcgggcaaagaggcaagctgacgataggacatctacctatattgttaagaaaggggg

SEQ ID NO: 66 - DNA, 238 bp, Homo sapiens
  misc_feature 1, 106, 175, 189, 193, 207: n = A,T,C or G
ngtcctcataatttcatacaaacaccaagaccaaaatcctaattattggtattgcgtctcaaatttttcccattaacttaaaaaaaaaaaaaagcttaaacttacntgccttacaggttattaaatgaaactagaattaacaaacatgccaaaatgtttcacttttaataattanacacagctcctatnttgntttacaaaaaaatnaaagcatgtctttcaacatgcatccaaaaca

SEQ ID NO: 67 - DNA, 225 bp, Homo sapiens
aaaatgaatcaattttattccaattcttcaaaatttatacgtaatatgttgtttccaaaatgtaagtcaccctttatataatagttttattatttcatctttctttgatagtttttttttttcatcttttctttatggttcttcagtagaagccagaatcttgagttgcccagttaggagcctctgacctgctattctgattaagtttcttctcaatattcatgg

SEQ ID NO: 68 - DNA, 401 bp, Homo sapiens
  misc_feature 168, 319, 391, 394: n = A,T,C or G
ccttttaccaaatgtgatttagtttttaaggaattgcatgtaatttggcaaatactgattatggggcaaagggaaaaaacatgttctataatttgaatattctgtgtagattcttaaacactttatagttggattccagtttgtagttttgaaaaatacataaaaatnatacattataaatatatattatatatggcctatataaaactgaatttgatgtaacgtgggacggacaacttcttaatttctttgtgaggcactgcctttttcttgtttggttaactgaatcctttctaaacaagttctaaaaatatatttngtaatctatcagatttagcattttcctgaaaacgtattcaatatctaaaagcattcagtgatttttcttttngtntctgact

SEQ ID NO: 69 - DNA, 277 bp, Homo sapiens
cctgggaagagaatacctgggagaagaaccagaagagagggaaacctaggagcaggacactaagagaagactggaagacaaaagatcagggttgaaggtcccagcagtccttggctccattagactaaagctaaggaatgggagtgaaaagggttccctgcctcacccagcagctcccacctgaacccatcagtccccggctcttctgcctcagggacatcacacaggcccatgccaacatttcctttctcctctcaccccacttcccttatctccc

SEQ ID NO: 70 - DNA, 385 bp, Homo sapiens
ctggtggatggtgacttttgaagaacaaaaggctttggcaacagaaaacaattgttctgggtgatttctagaatggtttttgttgagtctctgaacatcctaaatattggtttgttattcttttccagaaagaaaatgaatttgactggttcacctgtgtactgagtattgataaactttgaatttttttaattgccttcaattgggagagaaagctttatatttgtaagaaatatatttgataaagtttcttaaagcaacaccaaaaaaacaaaagaaaagctaagtgaatttttgcacattctacacacagtgcctgtaaatctcatttgtattttcagtttgcccttaattttttttgttagtgtttagaaaacaatgtttt

SEQ ID NO: 71 - DNA, 442 bp, Homo sapiens
  misc_feature 386, 440: n = A,T,C or G
aaaaaatcaactacagagaaagggccatgtcttcgagtccatgttcacattgtcccacgctgtcgcaccaggatgggccgcatactttgtcctggctgggactgtggcctcttggaagggtactgggccactccagggctcgggtgctgctcctcctggatccactagagggtgaactctgggccctcccagactcctgctcctctggggcccccaggactctggtaacccttccccttgctccaaaccagagccaggagctggagatgttagggaacttattttggtccccacaggggactcttccaggggcagagccctcccccgcccggcaggagatgacatcccagcccggcccagctcccaccctgggaggttggggtgtntctccccagtcttatctccagcccagcagacaccacacccgtgccctggttctnaa

SEQ ID NO: 72 - DNA, 300 bp, Homo sapiens
aaaaaaaatccaatattcacttaaagtagacataatacaaattaggctaccacccatcatatattttttgtatgcttcttatgaaaaatgtctactgttgtttcatgacatggtcttaaatcaaaatcacaatatccaagggaaaaacgactctgtggtttcttaaaataatcaagtccccttccaatcttaatcatccatccattgttgaacctaatttctcggtcatgtattgaagaagagtattgaacttccaacagcactccgtgactcctgagtgactcttctatttcttgcagg

SEQ ID NO: 73 - DNA, 269 bp, Homo sapiens
  misc_feature 269: n = A,T,C or G
aaaatgaaacgatggaccttcatttgagattgctcacaatttttaatatgtatacttgattgttaaaataacatgctgtcttcagaaaactgaaatttttgccttcttcaaaactaatctgttctttattaacaaaaagccattgtgcacactttggcaaaagtctgaaaattagtgagataatatctgtaaaaatttgactagaatttttatctaaaattataactttttaattaatgagattataaatacttgaaattctcttttgn

SEQ ID NO: 74 - DNA, 308 bp, Homo sapiens
aaacttgatccaacctctttgcatcttacaaagttaaacagctaaaagaagtaaaataagaaggcaatgcttgtggaatgtacagtgcatattggcggcgcacgcctcattacgattcgcctgcttgcttctcctgttcaatcgtttctttggaaggcagtggatttttctcttgcgtctctgtcttcttcagtttcgacttatcgaatttctcgatctcagccatatcgggtttgtcagacatggttgcggaggaaaagcaaagcgaggcgcacgagtacgagcgaagtctggtctgcgcagtggcc

SEQ ID NO: 75 - DNA, 636 bp, Homo sapiens
  misc_feature 337, 512, 537: n = A,T,C or G
aaaagaagcaagtaccattttccaagtataaaactcgtaatattaaaagtgacatagcagtatattcacatgactacttaagtctaatgcagaaacaagacagtacagtttttgcagaggccgatgtgacatctgcatgcgacatgatactattaagtgtctctacccacctctgctacagagtagctgctatatgcacacatacacaaaaatacacaatgaaaagcctacaaaagtgttaagtcaaactaaggctcttaattgtaaattaaagtggctacagtaggtccctttgaaaaacaccatctcccctggcaccaatgttgtcacagcacanaggaagcgagtggctcggggtctggttctggggagacgctctacaggggcacatgcttctccatcttggcagctggcaagccacagtggtgtctgctgggtggctctgggttcctggacctcattcaacataatgcactgaccaaacagctctgaccacagctactctcaaagangtgcctgccaggtctccctctgacncacacacatacacacactacccactcttggacccacaatgcactgctgggcaaacaggaaaaacgcacacacacacacacacgcataaatggcccacca

SEQ ID NO: 76 - DNA, 169 bp, Homo sapiens
aaaggcgctcaatagaaattcaaacctcactttaagaccatgaatttcaagttgcaatgaagtgtacaataaagttgtgatttctcaacatcaaagtttaattattacaaaatagttcaagcaacagatagaatttcaaaaactgtatttgctttgcttccttgttttg

SEQ ID NO: 77 - DNA, 356 bp, Homo sapiens
aaatttatttttattttaagactaagcatcctctttgacaatccaaaaacataatccttgctcactctggacacacacacctaaaacagttaaaagtgattcctcaatttgcaataacaaagtaggaaaaaaagaatacgttctcaagctgtagttcaatttttctgtcctcttttccaaaaaatgttactttgctaccaagcctcccaccaatgataaggaaagacaatttttcaaaaagccaacaaaacccagaaaaaggaacaggtatcaattcaaaattatcacccagaacactgctgttgcaaagaaagagtatgaagccaaattcccatagcttgttagagaagatcttt

SEQ ID NO: 78 - DNA, 517 bp, Homo sapiens
  misc_feature 444, 485, 490, 503: n = A,T,C or G
cttaaataatactgtacctaggtctttcaaattaaaattatacctgaatgaagttgtttgtatacataaaggatatttgtgtacaattaccttttttcccccacacttgttttctttgtttttgttttttatggcaactggaaagtatttactatgggattcatttatgtctgtctttctatcataaagaattgatcaatatgtaaatatgtgatttgaaccatggttgacttacaagtgtcactacagctttttagaaaacatagccctaatatatgttaagcaggacccgggtgagccagtgggcttgtgctttatgtagagctggaagaaggccgtccatcctgtctcttgggcggacagtgtactttcctaatagggaagggaagcacaatggaaatacccctgaaccgttttattgcagtaatttttttcatatctganactattatttaatattttgaataagattttaaaaaataaanggcanagatataaatctnaaagaaaaagaaaa

SEQ ID NO: 79 - DNA, 511 bp, Homo sapiens
cctcaagtgtgggaacttcccctactccctggatgtgtgtacctagcacacttccttctcccacccctttttccagttggatttgtttttctgttctcttctgtcctgtcttatactgcaactgtgtctcctaggggacagatggccttctttgtcatcttcactctccacccccagagaggagtcagagccataactcaatcactcagcccctccaaagatagttgatgtgtgataatctcataatgttgagaaccctgatgagatacattgtcttcctctccctacaatgcctctggggccaaggcacccattcttcttgctatcctccatcccccttgaggcttccactttttttttttagacataaagctgggcatcagcaactggcctgtggtgatgcaaagctgctttgctctgtatctggctggactgatctgtctcacaagaagccatgaggccatagggagaagctccctctccccttcatcttctgctccaaaggtggtag

SEQ ID NO: 80 - DNA, 454 bp, Homo sapiens
  misc_feature 11, 12, 13, 14, 50: n = A,T,C or G
aaaaaagtaannnntagaaattatctcactacttaaatcccatttttttnacttcatatgaaagaacatattgatagtatattctatattatttcatagatctgtctgaaagagattgggaacaaaaatatctaattgagatattctttaattttttacatagcagctttattttttttattctgtagtatcagcgaaatcagtcatgtttataccttgaatataaatatcaggaatcatgcaattatttctactatgtatttagtagtatcttatatttgtataacattattacattttgcaaattagtatcacaactgctaagtagatgtttctgagtattagaaaaatcagtgttattacctgcaggatattaaaaaacatttgaaaaagagaaaaagaaaaatcagtgtttagaaatgttgatagttattgaatctttgaattgaatttt

SEQ ID NO: 81 - DNA, 287 bp, Homo sapiens
  misc_feature 13, 14, 15, 50, 57: n = A,T,C or G
ctgccgcccccgnnntctgatctctgtagtggccccctcctccccggccncttttcnccccctgcctgccatactgcgcctaactcggtattaatccaaagcttattttgtaagagtgagctctggtggagacaaatgaggtctattacgtgggtgccctctccaaaggcggggtggcggtggaccaaaggaaggaagcaagcatctccgcatcgcatcctcttccattaaccagtggccggttgccactctcctcccctccctcagagacaccaaactgccaaaaa

SEQ ID NO: 82 - DNA, 389 bp, Homo sapiens
  misc_feature 50: n = A,T,C or G
ccggccgagacttttaattatgcaatgccagactgcattgcataaaccanaggccaacagagaggtgacctttcaaattactggcacaagaagagccgagatcagaaagctccaacttaatgcaaacatcgacaagaaatccgacagaaatgacttctgtgtctggtcaacttaacataacatgacatattgtcaagcacatttggctttttaggtagaattgtctataaaggtttaactgctttagaaaatataaatgtgaagatttgtggtatttgggtttatatataaggtatttctacattgaaaagagacagtggaaaagcttggtataagatttgtaaaatatgtttgtaataatgctaatggaagaggtgagagttgggtgg

SEQ ID NO: 83 - DNA, 546 bp, Homo sapiens
  misc_feature 15: n = A,T,C or G
aaaaagtattctatnacaagatttttctgtaaactagattatgttgtaaacttttttctaaatcttgtaggagtgtcggttgttaagaactagagcttattcctattccaaatctatcttgcgctcctgaaaaactgcagaaaggcacttgaaagctgtttctttaagatatggatttcttttttattcttgctggtaatatattgctgcactgagtgtgtgcaatttttattcaaggtcatcgtgatgctgagaagtttcgttgataacctgtccatctctagtttcaaccgtcttaatcagaagtgtcctttttgagtgggtatcaaccagagggagtgaatccagattagtttccctcaggttcagggaggaaaagtttggaagaggcagagaaatcctgctctcctcgccttccagcagcttcctgtaggtggcaatctcaatgtcaagggccatcttaacattgagcaggtcttggtattcacgaaggtgacgagccatttcctccttcatattctgaatctcatcctgcagcggccaata

SEQ ID NO: 84 - DNA, 490 bp, Homo sapiens
  misc_feature 14: n = A,T,C or G
aaaaagcacaaacnttcaaattaaaaatacaataaattattcattctaaccttagcaaaggtacatggattctgtctaccaaatattaattttacagtgaccacaaaaggttatttggttgttacaaagactacaatttgaagatactagataggcaaaaattttgccattattaatatcgaccaaacacagaaaagacaacagatgtgtttctaaggcacgatttacatactaaattcccttgaaattcaatgcaatttcacttcgctcatgattttcaatcacaagacacctgtgacaaatgaggaacaaatccagaagagcccatctaatctcgtcttaagtggtcccttaaatacgttaaaagcccacaatataggcatttacaaggcttttctaagacttccagctcctgaaaaaatcacaccttcacagtttcaaatcaaccacctaagttgctaaggggcagcgaaggatgctgatctgctgc

SEQ ID NO: 85 - DNA, 437 bp, Homo sapiens
  misc_feature 48, 397, 399, 421, 425: n = A,T,C or G
aaaaatacactttaaacgcatgtttgacactctaaactttctataccntcaataccacaaaatacatataatatactatacagatgtggaaaaatctagttagtatataatactttgctcaccattaacagctttatcgtgtgaaatgcacatactgacttagaaatcctagcttttgagccccaaagtacctctgaaattgtaatgtattgcaacaaataaaaatcacagtatataattgaaattctggttgaaaatgtcagatgcctaaatattttggataaaagaaatgtaaaacaaagatttggttcatgtacaaaacaaaggcatccttatcagtcactaacagtacctttctgcaaaatcaacaggcttttaatttatcagtgacattatntnccctccaaaaccctccccaaanatcnaacaattatata

SEQ ID NO: 86 - DNA, 391 bp, Homo sapiens
  misc_feature 14, 49: n = A,T,C or G
aaattattagaaancattgaattatttcagtaattttatgatcattcanttctgcaatccttagcattgagttctagccattaatagtattttaagaaacttggaagaaaaaagtcacattgcctgaattttacattattctagatgttagattattatctgcttcttagagtatttcagagcaccagaattcctttataacattttttcattatttccatttagactttgattaattactattgtcaagagagatatttccatcatgtattactggttgccagtgaaggaattaagaggtatggaagtgatccagtcttcaggttttatcatgcctatggcacattaatggaaggtacgtgttaatcattaaacatgttccatcagtttt

SEQ ID NO: 87 - DNA, 381 bp, Homo sapiens
  misc_feature 14, 15, 379: n = A,T,C or G
ctgtctgggaagtnnggggttagcttggggacctgaactgtcctggatgccccaagccatgttccccagttcagtgttgcatgtataatagatttctcctcttcctgccccccttggcatgggtgagacctgaccagtcagatggtagttgagggtgacttttcctgctgcctggcctttataattttactcactcactctgatttatgttttgatcaaatttgaacttcattttggggggtattttggtactgtgatggggtcatcaaattattaatctgaaaatagcaacccagaatgtaaaaaagaaaaaactggggggaaaaagaccaaggtctacagtgatagagcaaagcatcaaagaatctttaaggaaggntt

SEQ ID NO: 88 - DNA, 199 bp, Homo sapiens
  misc_feature 47: n = A,T,C or G
tttttttttatttaacataaatcataaagattctatatttaattatnaaaacataaaattatcacatcaatttaattcttataagtttatacatactgcataatgactttgaaaacagtataactcaaaataatagaaaacaaaattaattgaatgaagtactactgaatttcaggtatttctgtgacaacacaaattt

SEQ ID NO: 89 - DNA, 470 bp, Homo sapiens
  misc_feature 15, 50, 427: n = A,T,C or G
aaacacacagttttnacgctgtagtaacttggaaatgtgcaaccgtgttnacagagacagaaaagccaaagtaacacgaatctcactttcatgcagctatcagttaaatattacatactctggaatgattttacaccaaaaatatttccacaattacttgctctcataggggtggatcgaagtcttaaaacttgaaaaacaatcaaagaaggttaagtgttctcggttctgacatctccatcagcgccacacactgtggcaacactgactaattacacagcaacaaggagggaacgatgatgccaagttactgcataatttaggtacattgtatgaaatggggctactgggtactttttacaaaatattgtgcaccatttggcagtagtttgtcaattaacttgtgtcaccaccatctgcaacagcntcaagattagatggatgatatttcacagaagacttagctacat

SEQ ID NO: 90 - DNA, 372 bp, Homo sapiens
  misc_feature 13, 15, 44, 370: n = A,T,C or G
aaatgaaaggccntntttgtaaacatatacattcatattctctnttgccccaagttttaggaacatgttaggatataggagacttaatttataataatgagagcatttttttattttactaaagccatttttatagtcaactatcttttcttatttgtgtgattagaacttagaaaaatatttactagttgaagttattatcagtttttaatttagttcttaaactcatttcacttctaataatttctgttataaatttccagcattttaatgaaaatctaatgatgtaataggcattttctttatttgaacctacctcttttattttctgaaccaaagagaaagatggactggtgtttgtgaaacattntt

SEQ ID NO: 91 - DNA, 493 bp, Homo sapiens
  misc_feature 434: n = A,T,C or G
cctcttgggtgcattgggatccttgaacttcttttttgtctcccctttgggagggatataggttttcatttctctttcataacgggccttgtccgcttttgccatatcttcaaattttcctttctctttagcagacatggtcttccacctctctgagcacttcttagaaaactctgagaagttgactgaagcatctgggtgcttcttcttatgctcctcccgacaagtttgcacaaaaaatgcatatgatgacattttgcctctcggcttcttaggatctcctttgcccatgtttagttatttttctaaaaaataaaataaatatttgatgttagcaataaaattatgacatataagaccttaaagtacttagtaaggggaatgaaaaccaaagtactggttatttaacacagtagccgacatcaacctccgtnaaatcagacaagaatatggcccgagagattaaattccttgaaggggctatgccaagcaa

SEQ ID NO: 92 - DNA, 363 bp, Homo sapiens
  misc_feature 1, 345: n = A,T,C or G
ntcccccccacccaaagacatgtgagcaactgcttatgaaaagcagtaaacagccgcttaggctatagcagtttcaactccactctgaggtgaagattccaattacattcgagacttaagttctttcaattttttcctaacaaaagttcctgagtccagtatttacaatattacagcactagcagatcagtgtctacaactcatctttttctgctgtatcctcttcaccagttgggggagggcctgcacttccatagagtttgctgataattggttgaacaatttcttccagttccttcttcttagctttgaagtcttcaatgtcagcatcttggtggcgttccngccattcaatcttttctt

SEQ ID NO: 93 - DNA, 395 bp, Homo sapiens
  misc_feature 11, 48: n = A,T,C or G
ccaagtggatnttaacagtagcagtgcactgcactgacatccagaacntaaaatagggaaggaccagagaatgcacttcctgcaaaaaaaagtccagtagatcacaagcacaaagagttcccaactgtctcaccagctctctaactcatgtgtacctgcaccttcctcttgaaatctgaacattataataccacaagccactttcagcctccagtgggaaggctccagccacacgccgatatttcgtcctgcttcccgtcatctcatatctaaaagtcatggcttaagttaggcaataaaacctgtggctttaggcatctttagtaaaaaagctgaacaaatcccaaatttattcccattttcttgagaaataaacttcataaaacaacagacag

SEQ ID NO: 94 - DNA, 494 bp, Homo sapiens
  misc_feature 13: n = A,T,C or G
aaatggaagactnttctaaaatcacttttttccctaatccaatttttagagtggctagtagtttcttcatttgaaattgtaagcatccggtcagtaagaatgcccatccagttttctatatttcatagtcaaagccttgaaagcatctacaaatctctttttttaggttttgtccatagcatcagttgatccttactaagtttttcatgggagacttccttcatcacatcttatgttgaaatcactttctgtagtcaaagtataccaaaaccaatttatctgaactaaattctaaagtatggttatacaaaccatatacatctggttaccaaacataaatgctgaacattccatattattatagttaatgtcttaatccagcttgcaagtgaatggaaaaaaaataagcttcaaactaggtattctgggaatgatgtaatgctctgaatttagtatgatataaagaaaacttttttgtgctaaaaatacttttt

SEQ ID NO: 95 - DNA, 528 bp, Homo sapiens
  misc_feature 15: n = A,T,C or G
aaaaataaatatgtnctacggaacatctcgaaaaactgcactagagacaaagacgtgatgttaatatcttttccccacaattattacggataaacagtagcaccaataaataaatgataacaaatattaaaattaaaaaaggagagagatttagtatgtagaattctctattttttcttgttttgtttttacatataaaaaacagaatagcaatgtctattttatcagaatcacatatatacataaacatatatatatatatatacacacaaatacaagttgccaaatatatatatagtatgtagatgtatattgaaaccttatttcaaaggaatgtgtgctggggagccaggggatcggggagggcagagctgagtgttagcaaaattaaatatctgttcaagataagctagtgactgtcacccgatcagggagagagagattggaaacatgaattttatatacaaaaaccggtcaaataagagagcaagagagagcaaaagatacatctcataaatagttgaaatt

SEQ ID NO: 96 - DNA, 371 bp, Homo sapiens
  misc_feature 14, 50, 194, 261, 304, 328, 347, 371: n = A,T,C or G
ctggccggcggtgnagatctggagtccagcctcagggatgcgctactttncattctctgcattgaacattcgttctgtcagcatccgctccagcttcactgcatcagcggcaaacttgcggatcccgtcagagagcttctccacagccatctggtcctcgttgtgcaaccaacggaaagacttctcatccaggnggattttttccaggtcactggcttgggctgggggacaagaaccagccttccatgcctgctccatgtncctgcccaccttggccccttgggctcagggcctgaactgctgnacccaaagcatcttccaccagggncaggacctgccccggcggnacggtcgaaaaggcgaattctgcn

SEQ ID NO: 97 - DNA, 186 bp, Homo sapiens
  misc_feature 15, 51: n = A,T,C or G
ggcgtcccaaatgtnaagaagcaggcaaagggaaggagcccctgagaacanccaatctccgctctctcctgtccatttgacctcttcttttccttctaagaaagaactaagctttgggcatttggcgattgtgaaaattctatcctgatggacttctggaaaactgtgactggggttcaagagttt

SEQ ID NO: 98 - DNA, 275 bp, Homo sapiens
  misc_feature 12, 13: n = A,T,C or G
cctggctgagcnntgcagagcaccctgggaccccagggcagaaggacccctgccctccagtccccaagacccaggcccgtctccactcatacacgccacctacatgtgacgtcagccctgaaaaggtaacaggaaagttcagaacaaaaacaaaaccccaaaagtaaaaaggctacgtgtagcagagtaataccggaaacgttatatacacaggcggtgatggccccctcggaagtgtccgggtcacttagggggcactgcagaggtccctgtgg

SEQ ID NO: 99 - DNA, 192 bp, Homo sapiens
  misc_feature 13, 14, 49, 51, 84, 136, 165: n = A,T,C or G
aaaatgaaatttnnttagcacatattgaacatttgacttaattggtaantnccagttttgttttgtttttttaatcagattttngcacactgattagtttttgtgttgtggcttttgttgctttattattcaaggntttttttttttttcttccccatggggganattgtcttccaatgtttaactacgttt

SEQ ID NO: 100 - DNA, 540 bp, Homo sapiens
  misc_feature 47, 49: n = A,T,C or G
caagataaaagatttattcacaccacaaaaagataatcacaacaaantntacactaacttaaaaaacaaaagattatagtgacataaaatgttatattctctttttaagtgggtaaaagtattttgtttgcttctacataaatttctattcatgagagaataacaaatattaaaatacagtgatagtttgcatttcttctatagaatgaacatagacataaccctgaagcttttagtttacagggagtttccatgaagccacaaactaaactaattatcaaacacatcagtcatttccagactcaaatagatacacattcaaccaataaactgagaaagaagcatttcatgttctctttcattttgctataaagcattttttcttttgactaaatgcaaagtgagaaattgtattttttctccttttaattgacctcagaagatgcactatctaattcatgagaaatacgaaatttcaggtgtttatcttcttccttacttttggggtctacaaccagcatatcttcatggctgggaaat

SEQ ID NO: 101 - DNA, 332 bp, Homo sapiens
  misc_feature 47, 50: n = A,T,C or G
gtcaaatttccttaattgctatgtgtctgggtttcatccatccgacnttnaagttgacttactgaagaatggagagagaattgaaaaagtggagcattcagacttgtctttcagcaaggactggtctttctatctcttgtactacactgaattcacccccactgaaaaagatgagtatgcctgccgtgtgaaccatgtgactttgtcacagcccaaggtagttaagtgggatcgagacatgtaagcagcatcatggaggtttgaagatgccgcatttggattggatgaattccaaattctgcttgcttgctttttaatattgatatgcttat

SEQ ID NO: 102 - DNA, 347 bp, Homo sapiens
  misc_feature 12, 47, 50: n = A,T,C or G
aaatatgatganttgtttcttatcttctaaacttcaacgaaggctgnttntacaaactatttaatgcatatctgccccattaaacaagatatttgatgtagcagagaagccagaagctgagtcacttcatttctttctgttgcctccagttgccagcatagttgcaactcgcataaatatatttaatgtatccatgtagatactcagcatcgagttaatgggatcatatttttgaactccatacattggtgatacttctgcacgcttgattactttctgggtatcatacagaaggaacatgctgaaaagaactaatccaccgtacattgccactgagtaaagagtgg

SEQ ID NO: 103 - DNA, 348 bp, Homo sapiens
  misc_feature 13, 50: n = A,T,C or G
ctgatgccatgcncttgtctgagggcatagctccatgtcttctgacattnctggtgtcccaaagaatagcaaaaagccagtttgaatattatgtaacttatttttttaatgtggacaggggaccttgaaaatcactaagttattaaaaatgtggatgtgctagaattggatatgtccaggaacatgggaagggctcactattggaatcccatgagtttccattttgtctctacccaaacgtattccaaagctgactgcatttgtaccatcttatttcttttggggattatacacctcagccgcctgagatgggggtcagctctttatataaagggaaaccagaccagg

SEQ ID NO: 104 - DNA, 339 bp, Homo sapiens
  misc_feature 44, 50: n = A,T,C or G
ccagcagtacatatttattattattcatgaatggtgaaaagacntacaangcccattattatgagtataaccacacatatgaaatatcacttagcggcaacatgggatgaaaaggacagttatatatttatattaaaaaaatacacgtttgcattcaatgtttgcctagaaaaaaaatacatgtacacacgctctttcaagtgctccccataaactgctataaaagcaggaggcatcaagctgtagaagttccaatatacataacatgttgaaatatctcaagcataaaaactgtacgtaacttgcaaaaataaagttcctttcttcaaacattttgat

SEQ ID NO: 105 - DNA, 377 bp, Homo sapiens
  misc_feature 12: n = A,T,C or G
gaatgagtttcnttcacttcttttacttaatgttttaagtatagtaccaataatttcattaacctgttctcaagtggtttagctaccattctgccatttttaatttttatttaattttatttgcttgagcacactgatcaaccactgaactgccttcttccattgtcctgcaatgatataagggttacatttttgtgtatatggctttcatagttgggatttcagagcactgataccagatattttcagtttgttctctgggggaatttcatttgcatctatgtttttagctatctgtgataacttgttaaatattaaaaagatattttgcttctattggaacatttgtatactcgcaactatatttctgtaaacag

SEQ ID NO: 106 - DNA, 406 bp, Homo sapiens
ctgtcttgtgagggactgagatgcaggatttcttcacgcctcccctttgtgacttcaagagcctctggcatctctttctgcaaaggcacctgaatgtgtctgcgtccctgttagcataatgtgaggaggtggagagacagcccacccttgtgtccactgtgacccctgttcccatgctgacctgtgtttcctccccagtcatctttcttgttccagagaggtggggctggatgtctccatctctgtctcaactttacgtgcactgagctgcaacttcttacttccctactgaaaataagaatctgaatataaatttgttttctcaaatatttgctatgagaggttgatggattaattaaataagtcaattcctgggaatgtgaagagagcaaataaagacctgaga

SEQ ID NO: 107 - DNA, 514 bp, Homo sapiens
  misc_feature 11, 14, 47: n = A,T,C or G
aaagaaaaaanttncaattaagaatggaaattaaaatgtaaaaccantataaatatttttggcttttggactaaaaaaaaaagattagtgaggaaaaccaataaataatggggagagaaagaaatgctactaattttctcttcatgattaaaaaaaaaatcttttaaccatatttggggtgactggaaattaacagtgatgattttgagctaaaaaatcagtgacacattttattaaaacaaaaggaacaaaggaactttaaccagaccatacatgtaaaggctgtttagcatagcaatttcatggattcaaaatatatctttaatgacaaacaaaccaataaccaggaggaatgaagactgtccttccctttataatgtgatattaaagtgtggcctatggacaatttataaagtaaagagtttgaagtttaatttttattttacaaaaattgacactattaaaaccaacatgattatctttcactcatcccaataactgagctaacagtatt

SEQ ID NO: 108 - DNA, 362 bp, Homo sapiens
  misc_feature 14, 15, 42, 43, 51, 83, 84: n = A,T,C or G
ccaggggcaatttnnattcaaagccactattgtgagctgcannggactttnccaccatgtaattcataatgtgttgaaaatcnnatgctcatgataaatgatcattgattagggcccctagttgtgagtgtacctatattttttcattctataaaagcaaatattaaatcaacatgaagagtaaataattacccatattatattgagaggctgaaattggtttatattccatatggagttcaattgatcattattttcatccttgacacttgggtttatccattctccaaaccaccactttggaagagcaagtgaatatacaattactgctaaaaaaggtacatacctccaattttgtgttg

SEQ ID NO: 109 - DNA, 401 bp, Homo sapiens
  misc_feature 12, 42: n = A,T,C or G
gctgcctgtgtnggactgagatgcaggatttcttcacacctntcctttgtgacttcaagagcctctggcatctctttctacaaaggcatctgaatgtgtctgcgttcctgttagcataatgtgaggaggtggagagacagcccacccccgtgtccaccgtgacccctgtccccacactgacctgtgttccctccccgatcatctttcctgttccagagaagtgggctggatgtctccatctctgtctcaactttacgtgtactgagctgcaacttcttccctactgaaaataagaatctgaatataaatttgttttctcaaatatttgctatgagaggttgatggattaattaaataagtcaattcctggaagttgagagagcaaataaagacctgagaac

SEQ ID NO: 110 - DNA, 343 bp, Homo sapiens
  misc_feature 15, 48, 50: n = A,T,C or G
aaaacagagaatttnatattgattaacacctactactaaacagaatgntncattaattaaatgccttgtcctaactgttataagctctgttagaaaaataaacatctcaccacaaactacagtgtcagctctttaataaatacataaaacagaagttagtagtcaatcagagttatatgaacaggttcatagtatattatgtgaaagtatcatattctccaatattctgtatcatttaagacaatttaagttacgtataattcaaagccagaaataataagaaatatgttcagtgataatttgcttctttcttagagctattttatattcaaatatttaattt

SEQ ID NO: 111 - DNA, 441 bp, Homo sapiens
gctgcattgcccttgctcaccctgaccaagcacacgcctcagaggggccctcagcctctcctgaagccctcttgtggcaagaactgtggaccatgccagtcccgtctggtttccatcccaccactccaaggactgagactgacctcctctggtgacactggcctagggcctgacactctcctaagaggttctctccaagcccccaaatagctccaggcgccctcggccgcccatcatggttaattctgtccaacaaacacacacgggtagattgctggcctgttgtaggtggtagggacacagatgaccgacctggtcactcctcctgccaacattcagtctggtatgtgaggcgtgcgtgaagcaagaactcctggagctacagggacagggagccatcattcctgcctgggaatcctggaagacttcctgcaggagtca

SEQ ID NO: 112 - DNA, 436 bp, Homo sapiens
  misc_feature 12, 13, 14: n = A,T,C or G
cctggctaatannncctgcttttaataccactaaaaatataactaaatgctacatcctgcagatcagggtccaatttgtattatctccatatataaagagtggcacaattcaattatatttctattagaagcactatcactttggtaagtttggatgaaaaagagaattagtaagcttttgtggtttaagaacaggataaaccagctaataaatgtggcattttagcctatcaaatattttcaattcagaaaggtaaggtctgaaaaaacatcagtagcaggaaaaaaaacacattagtgcctatttagataccaggcaactaattgctaatatgaccataatgactggtcactcatatgagtatccacaaataaaaatgtacttaaaataaacgtcagcatccttaaatatatatgaccgaaagccttaaccgtt

SEQ ID NO: 113 - DNA, 309 bp, Homo sapiens
ctgactcgttttataactgtccttcccacggctgtcccaatcagaaggcgcgttcaggtcctgggcaacggggatggccttgtatgcaccattcaactcctcgctttccatgtgtgaggtgatgtcctcgtctgtagcatcagggtactgaatcacggcacaaatgaagaataattatatgaacggctagggatgggaatatggtaatccttttccactctctagcttttaggtcatcttatactaaaaattgtctaaatctggctgaaataatactagcatgttactttgtatagtactttaccaagg

SEQ ID NO: 114 - DNA, 386 bp, Homo sapiens
  misc_feature 44, 45, 49: n = A,T,C or G
aaaacaactactttacatttactcatagataaaaatatttacanntttncaccttcaggaaggctccaaaatataaacactgtacctctccctagagaaaaaaaaaattattcttctcttcaaaaacaggaatacattcattttttctcactgtgtgaatcaagtaattatacaaataaacatctgaaacattttcctttttaatatatttatataatatatatttataacagctttacaaataaaggcaacgacttaataccaaaataaaaacaggaaaagaaaaagttaaaacacgatcagcaatcaggcatagtgcattttgaaaagctgctgcggagctggctggacacatcgggaaaacaagtactctggaccaaaaataa

SEQ ID NO: 115 - DNA, 219 bp, Homo sapiens
  misc_feature 9, 10, 13: n = A,T,C or G
gggatttannttntattagtcacgcatgtatggggaagtaggctcttttatgctgttgtgaaattgaaactgtaaaagtagatggttgaaagtactggtatgttgctctgtatggtaagaactaattctgttacgtcatgtacataattactaatcacttttcttcccctttacagcacaaataaagtttgagttctaaactcaaaaaaaaaaaaaaaa

SEQ ID NO: 116 - DNA, 224 bp, Homo sapiens
  misc_feature 15, 44, 220: n = A,T,C or G
aaaacaacacatttntaattgactctgtgcaggatgtcactcantcagtttgggtttgctttattttattttatatatatattttttggtatcctgtacattgcagtgggtgtgaagatagtattttaatatttgtacaaagtttaatttaattttaattgttctatgtatataactgcatttctaaataattaaaaaaaagttcttatgaagacaaaanaaaa

SEQ ID NO: 117 - DNA, 314 bp, Homo sapiens
  misc_feature 36, 38, 55, 70, 123, 125, 152, 231, 248, 311: n = A,T,C or G
gctttttttttttttttttttttttggctttttaananacttttatttgagtggntcttacaaagattgntgcaatatgaaagtcatttgtttgatagaaatatcaagctgtcttgtcaaacncnctgaagtaacccaaaaatatatttcanagctcacagagcttaaaaagagcaaagattatatgcaaccagacaaaacctatttctgcatttcctatttctttctcanactgctttgcctaccanactctcacgtttaaacatcttcaggaaatgcagggatcattttgtttggaattttaagacacnccc

SEQ ID NO: 118 - DNA, 215 bp, Homo sapiens
  misc_feature 43, 44, 47, 49: n = A,T,C or G
aaagagatttatttaatcatcttatcacaaagatggaaacatnnacntnctagaaacatgcaaccatcatcttccacagtcaagtcacaatgtcaaatatttttcttgcctctgcagatgaaaagttcagatcttatacccaactacttactcaccccgaatatttaagtcagtcttcctgaaagtactcagggtagcaagtaacaaaatgcaaa

SEQ ID NO: 119 - DNA, 307 bp, Homo sapiens
  misc_feature 15, 16, 49, 51: n = A,T,C or G
aaattttctcacttnngacttttcaaagccatctcaaaggagcttcctnanaacatttaatgttggcatcaccccacaagtactcagaaataagtgttaaaatagaaatccaatccagtaatgggaaactgacttagattatcttatttgtttgtatatttatttgtcatctatctctcttattcactgctctattttcaacatctacaatagtgcttagtaatgaatacacatgcagtacacaaaggtgctaacacaatacatgactaatgatgagggctatgcacatttatacagaatgagaatt

SEQ ID NO: 120 - DNA, 141 bp, Homo sapiens
  misc_feature 2, 4, 6, 8, 39, 66, 81, 109, 122: n = A,T,C or G
gnanancntttttaacggatccctgtgcaggactctctncagcttttttttataaaatcttgattntcagctcaggctgcnttctaactcatactgtgaagacaaaggngtttttgattcanaaatatatgaaatctgcat

SEQ ID NO: 121 - DNA, 330 bp, Homo sapiens
  misc_feature 1, 35, 277, 313, 323: n = A,T,C or G
nattaaactttgatcagtaacaactacaatttgcntaatccggcacagtttgtaatatagcgcctatgttggatttcataacttagatgatttttccccttctagttacttgattataagagagaaactgtctccatgagagtagttccctgtctttatgcactcttctcaatacttgcacagtgtaaatgccgcccttattcttccattacttggcactgacaatattcctctgcttttgtcttcagaaatgatttctatttgaactttaagtgtnctcatatatactgtattctccttcaacccagatttnatgacactgntcctagt

SEQ ID NO: 122 - DNA, 359 bp, Homo sapiens
  misc_feature 14, 15, 17: n = A,T,C or G
gaaacgcaaggagnntngaaaagaaaaaacggcgaactcgctctgcctggttagactctggagtgactgggagtgggctagaaggggaccacctgtctgacacctccacaacgtcgctggagctcgattcacggaggcattgaaattttcagcagagaccttccaaggacatattgcaggattctgtaatagtgaacatatggaaagtattagaaatatttattgtctgtaaatactgtaaatgcattggaataaaactgtctcccccattgctctatgaaactgcacattggtcattgtgaatatttttttttgccaaggctaatccaattattattatcacatttaccataatttat

SEQ ID NO: 123 - DNA, 301 bp, Homo sapiens
  misc_feature 48: n = A,T,C or G
ctgtacttttgttggcctgtcatcttgatgaccagaatgaaagcttgntctgcctcctgccagccagaattggtggcgggacttggggatacagcgtgaaggtggggaagttgcacagcagaaaacagaattgaagttgggaaactctagagtctgggcaaaatgtttggttttttctcttaaaaaaaataacaccccattaccaaaagaaaaggtaaggtggcaaccttatttttaatagtttgaaatgatgataatcctaattatataaaaatatatatataaacacacatatatatag

SEQ ID NO: 124 - DNA, 560 bp, Homo sapiens
  misc_feature 35: n = A,T,C or G
tatgtatttacacataaagttactgtatatataanatatattttcaaggactcatgggcttgggaatattcaaaagacattattgctacatttcaatatttacaaaaaaagccacaaaataatttcaaacattaagccactgcaaagaaacatctgatgtaagaaaaaattataaaaatataaactttcaagaatatccaagacaaaactctcaatgaagtgcccctgaagtacctagacatctataactaacaaccacttttcttactatcattgaagtcaatagaaacacaaaggaatttttcagacaaagtatggcaaacaacaatctcttgggtgacaacacaaccccaaaatctgttaactttggaaaggtgcgagagcatagaactccagtgcaaatggttacttccagataacggccacagttctctaaatgtagtctaagaaatgtagaagggggaaaccataaaggcaacatacctgaatctttcaagacaacacacaaactctgccatgtacacatttgccttttatattgggcagtgaggaaggggagt

SEQ ID NO: 125 - DNA, 571 bp, Homo sapiens
  misc_feature 14, 52, 549, 561: n = A,T,C or G
aaaagaagaaaaancgttagcaattttaagttaagttgcagtaacttttttnaaataaaatattagcaccataccagataaaataatctaaaactattggccttctcattcttcttaaataactaaatagaaactttttttcaaagcacaaatattaatttgtaaaatcagttctacagtagttaatatttctttctttattgtttcttttttgcatttttccctataaggaaaaatatgaattaaaaactttcacgggatatgaaaatcaaacaaataaatctgacccaaccaagtactgtccttcagcaatgagttccgacagaagcaaaagtggacatttcacggcgtatggtactgaaaggcgagagttcgagttccgtggtgtactcgttgtcattgtcatcactggtcaccgttgaagacttctgaatgcattcctcacagcaacagcagcagcattccatgaaggcccgactgaagggtttgcagagacagaaaaggaggactggggtgacacaggacttaaagaacaaaaggaactggctngatgatattaangaggtccatt

SEQ ID NO: 126 - DNA, 262 bp, Homo sapiens
  misc_feature 13, 15, 50, 93: n = A,T,C or G
aaaggaatgtgcntntttactaggactgtgttatagtgtggatactgganaatgtatagctttttgattagggcaatggagtgcataaattanaaacttctaagtgcactggttttcaaagagatatatataatgcatttattctgtcaggttaaaatataaagtatgatctttatgattttttccctctaattatagaaagttaaataatgtattaccatgaaaaatgtttctaatattaaatagaacatatcagtcaaaa

SEQ ID NO: 127 - DNA, 374 bp, Homo sapiens
  misc_feature 50: n = A,T,C or G
ataacagtgcaagattttgtaaattcttttttgtgtttaatgtttaatanaacgagtattaagcttaaattactgaagtacctgggagaagtaatgatgtgtactttcaaaaaaatggaaaatgcttttattttattttctataatttgttaacatgatatgtaaaattaaacttcggagcacaatgaaatgccgattatttttaccttgtttgggcttaaagtaggtatttaaggtttatgtgttcaaaatgccttggtaaattggatgacctctaactttactgtccatatggagtttgtcattctttatggataagagaacttaaggaaaagttactgtttttcttcagtctttttatatctatctgattt

SEQ ID NO: 128 - DNA, 366 bp, Homo sapiens
  misc_feature 15, 51, 54, 288, 323, 328, 337, 365: n = A,T,C or G
ctgcacggccaggcntttgttgcggtcccccgtgatgctatgcaccttctncanacccagccagaactcgccgtggggatccccaaaccccgccttgtaggcttcccagggccggttgaagtccactgagccatcgtggcgcctctgaattactgtccagcctccatctgaggtcatcttgcagttcaccaaaaatggcggagacccctgaggctggatttcaaatagtccactctgcctctccccaacctggaacagctcctggcaatccctgggcagccggtgcangcggctgacattgtgagccgggtcaactggctggnccatntcaggcagnctctttcttcgggcaggcttggacctgnc

SEQ ID NO: 129 - DNA, 306 bp, Homo sapiens
ggtaataaggggtcagatgctctacagcaaccttcaagcacaggcaccgatttgcattttatgcaaaacttcaggttttactcaatttttacactggtggaagctgatgtcagtaacttaaaaggcaagcaaatacttttccaattcttagctgaacaaaaaatacacacaatgtagcgtttttattgggcaagacttgctttttatatttcacgtgagaatgcaatataacccttccttgaacaaaatgaccagggtactaataaaaccatctttgcaggagtgtttaataagcatattttattt

SEQ ID NO: 130 - DNA, 421 bp, Homo sapiens
  misc_feature 13: n = A,T,C or G
cctgggaagaganttcctgggagaagaaccagaagagagggaaacctatgagcaggacactaagagaagactggaagacaaaagatcagggttgaaggtcccagcagtccttggctccattagactaaagctaaggaatgggagtgaaaagggttccctgcctcacccagcagctcccacctgaacccatcagtccccggctcttctgcctcagggacatcacacaggcccatgccaacatttcctttctcctctcaccccacttcccttatctcccacctatactcttccatcctagggaaatcaaaagtaaaagtctaaaaaatcccagggaggcagagaggggcttctatgtccatctgggacatgtccctggtcaccaagcggaagctctccctggcggcatcactgtcctggaccg

SEQ ID NO: 131 - DNA, 201 bp, Homo sapiens
  misc_feature 50, 84, 85, 86: n = A,T,C or G
aaattaacttttttttgcaaaatattcatttcattttttccaagaaaatnttataaaggcaaaaataaaattttattttggcannngtcatgaagtcgatactggcagcatatggagttagttaaaaatagacaacaactgctaaatatattcaaaattctatttttttttctgagcatagtcaaagagaaattttcattt

SEQ ID NO: 132 - DNA, 402 bp, Homo sapiens
  misc_feature 14, 16, 50, 357, 391: n = A,T,C or G
aaacataatgcctntnggtcactaatttctagcaggtaaaattataaggntataaattccaataataaaccaaatgtatttagagtatttattagtaaatgcaaggtgatgttagttatgatcagttatactctaaatatttaatttgttttataaaggtagtgaaaaaatgaaaatttgctatttattaaaaaacattaaatttcattccaaatgagataagtgatattactataacatctaagcatcatctgatttgatattccctaaaaaacatttggaatatatgctatctatagattcagtatctactacccatatttactttaccaaatatatttctcctcactgcataangactactcttctcatattttcttctttaatgaanatatttttcac

SEQ ID NO: 133 - DNA, 476 bp, Homo sapiens
  misc_feature 50: n = A,T,C or G
ccttgttcttttgaaatcttttgaagaaattcccttatcttgtcaacatntttcccagcataaatatgccacagagcaccaggtatttcacttgagtccttcaatcttttccttaaaatgtcatccaaatcttcttcctcaaatttcttgagaattcctgcttttgagagaatgccatttccttttgctatgccaacataaactagtatatttacaacatcagaaacttcaatatggagatttgttgttcctatatcatgatctttagcagcaactacaccataggcactgcacaacctgggtcctagatcaggacgtacaaaaaatcctggcaaatgagaggccaaattgaattttccttctggattacaatattctggcaatggcagactttttaaaatagctaaatttagtaagggaaaaaatagtttatgttttagaagactgaacttagcaaactaacctgaattttgtgc

SEQ ID NO: 134 - DNA, 526 bp, Homo sapiens
  misc_feature 51: n = A,T,C or G
aaaagatattttaacaaaagtctcatatccttgtacttcagtttttttgtntgtgaatactatccctataccactacccctaaaacctcagaattatttgctttattttttcatacaacttggggaagggaaccatgggagtatgcacatgggatcataatccattctgtggtttggaaaaagaaaatgttaacctctgctttagagggtagctactagctttgttggggataaaagtgtaatacatgcacttttgaactctgaaagtttgccaatctgaaaaggggtgtttctgaagaccactatcttttacgaacacttaaaaataagtgtttgcagttgtgtatgggcacgatactgtattctttacatttttatggccctacagctacttcttatccctgcaagtatataaattaaaaccaagtcactttagaacagctttgaaactagagtttcaaaggtaaaaggatctcatgtttctgaatctgcgtaaagcaagatggctgtgatttgacagatttaa

SEQ ID NO: 135 - DNA, 469 bp, Homo sapiens
  misc_feature 15: n = A,T,C or G
aaatttgaggtggtnttaagaataacaaatgaacagaattccaaatttttgaaataggtgaactgctgcagttacaggtatacatttaggaaaactgtatagctcttacaagaccagcaatgtaactttattttgtacatttttgaattgaaaatataaacaataattaaaaaataaaaagaaaatacagcataataaaaaacatacgcttctcaattaaatgtactggatacatataaattttaagggaagaagcaaaaaaggaaaatgattgatatttaagtgcagactgactacctagacaaaaaaaaagacttaaaaaaatatcataaaacctctagttcttctatgactaatatccatatggttggagtatcgtcactatggaagtgattttgttatgtttgcatatgttacactttactggtaatttacatgatggcttttaaggccctgggagacatggttt

SEQ ID NO: 136 - DNA, 486 bp, Homo sapiens
ctgttgagacagtatttttgagggctgatgttacctctagcggcgaaaccagagccagctattaagcagccagaaagctacagtaattgaatacatgaccatttctcttttagcacgttctttgttctcctcttccagaagttgcagacgtctatttagtttgattatctgtcgtcttagtgaagctgcatctacaacagtcaggtcatctgacgttccttcaatggttgtatctatatttgaaatgccatacctgacgttgtcatgatgaggattagaagtggcggcagcagacccaccacgcaacacaggtctgcgattttcatccagcacatccaagatctgctggtatgccctacgagtagaaggctggataagcgacaaaatgccacgagcagaggaaagattagctccatcttcaggtaacatatggggaggacagacccgagcctgttgtggcgatggtgtcacagtgtactccggtgc

SEQ ID NO: 137 - DNA, 415 bp, Homo sapiens
  misc_feature 14, 50: n = A,T,C or G
aaagaaaaacatancgtaaaagtgggcacagatccagagaggtagcaaanatcacaggggtggttccatgaatggctgacacttaggaaactctgaattaggccatcctcgagactagcccaccattcacctctgttcatcccccgtgggctcataatcgttttcatttcacctttgatttggaaggaagaagtttcttgcccaaatgcctggatgtgtctgcttgactttcagaacttctcacctcagccctaaagagggagcctgtgggttctcagagagatatcacaatttgagtcccaaagaagaggccagatacccacccaccttcccccaaatcttaagcacctgcgccagtacagtcaagaagaggaaagtgtgtgaagacccaggtctggctctgccacttgcctgg

SEQ ID NO: 138 - DNA, 323 bp, Homo sapiens
  misc_feature 50, 51: n = A,T,C or G
aaagacaaaaaaattcttttatgtacaatatcttgtctagagtctagcanntatagtacctttcattgcaggatttctgcttaatataacaagcaaaaacaaacaactgaaaaaatataaaccaaagcaaaccaaaccccccgctcaactacaaatgtcaatattgaatgaagcattaaaagacaaacataaagtaacttcagcttttatctagcaatgcagaatgaatactaaaattagtggcaaaaaaacaaacaacaaacaacaaacaaaacaaaacaaacaaacaaaaaatcccaccaatcttcatgggtaaactttcc

SEQ ID NO: 139 - DNA, 411 bp, Homo sapiens
  misc_feature 16, 19, 29, 47, 60, 159, 192, 212, 222, 326, 366, 386, 409: n = A,T,C or G
aacaaaactgaaaaanaanaaaataaaanggaaacgagataagaatntattcccgatatntgatgttacaaactttaagggccttgagatatgcaggatccttgtatgtaactggcataaaccccattatttgagctctcttaattgcttttgtgattnctttctgtttcttcccacaaagacctgtaatgngccttccataaatgcatccngtaaatgganaaacaaactgggacaaaagctgtacattcttataatctacatgctttccacacaagatacatttcttaagaggttctttataaggattttccattgaaatgggnaggtcctcattgctggatacctgttgtgaacaacctcttntccaaagcacccgtgtgagncccgggatgtgtaaggctgacanca

SEQ ID NO: 140 - DNA, 597 bp, Homo sapiens
aaataagcaatctgcttaatggacattggtatgaaggggaagtgtcattctttacctcactcctcaaacacttttctatccaaaggttggtttgagtcagtattggcatcatacaaccacttactgtaaaataagtttattagtggtaacgtgatagaatttattcccgatatctgatgttacaaactttagggtccttgagatatgcaggatccttgtatgtaactggcataaaccccattatttgagctctcttaattgcttttgtgatttctttctgtttcttcccacaaagacctgtaatgtgccttccataaatgcatccagtaaatggagaaacaaactgggacaaaagctgtacattcttataatctacatgctttccacacaagatacatttcttaagaggttctttataaggattttccattgaaatgggcaggtcctcattgctggatacctgttgtgaacaacctcttctccaaagcaccgtgtgagtcccgggatgtgtaaggctgacagcagccgttaccaagtgtgtcaacttcttcctccctagaccaccgcaaacagcaaccacagcggccatggttccgc

SEQ ID NO: 141 - DNA, 472 bp, Homo sapiens
  misc_feature 6, 10, 36, 44: n = A,T,C or G
agaaanattngactttgactgcctcccccattcttngctgtganctggaaagtgtgcagttggtcgtctttcttctcctttctttaggatagtaagagactcactcactgcacttctgctcagttggcttctgcatcgggatcacacagccatcagcaggactgcccagttggtgagcacactccattgaccacgtggcgccagcgcttcctcaatgcacatgattgagaggaaagaaagttctcttagatgttactgcttttgctcagactttgcaaaaaaaaatatatatatatatatgtataaatatataattattaatcacttttgtccttgagaaagtcttgaatgaacagagaatttattccattgcaatatttgattgtatagaggcacactgtttcatcgacagaagaagcaaaaaggctttgtgtaagtttttggtactatgtaccacctctgttattctttt

SEQ ID NO: 142 - DNA, 458 bp, Homo sapiens
aaaaatataaagatgcagtatcatttctgatataaagttacttaaaaaatccaaggtcttagggaattcacaaatcataactagaagtaacttttattaatttaatgtacacataattaccaaattttaatacattaaaaatgtgtaaatgcccacagactgtacaaaaattaacaccccattttgttaaaagttcccaaccacctcccaccataaatatacaaaaacctatttttagatatgtcaaaattgcatgcatgaatattttctaaagcttgaattttgctcttcactggataatgttatctatagctgtttctgtaacagactacataaacattgatatattatttaccatgcctttgaaactgtgcaggactttcataaacatggggaacaaaataaatagagtaaaaactgcaacagttttgtttagatgcaagtgcaattgggaaagc

SEQ ID NO: 143 - DNA, 272 bp, Homo sapiens
tttaaactttttatttgcatattaaaaaaattgtgcattccaataattaaaatcatttgaacaaaaaaaaaatggcactctgattaaactgcattacagcctgcaggacaccttgggccagcttggttttactctagatttcactgtcgtcccaccccacttcttccaccccacttcttccttcaccaacatgcaagttctttccttccctgccagccagatagatagacagatgggaaaggcaggcgcggccttcgttgtcagtagttctt

SEQ ID NO: 144 - DNA, 429 bp, Homo sapiens
ccatggtggaagaataactttgcgagatcacctcaaaccattcgattgtgtagccagcctctttcacagcagcctctactgcctcccggcccagggggaggctggagaacttctgctcaccaatcatgtagtagctgctcttgagcgcatccatgatcaccaggaagccccctggcttcagtaggctgccgaggttcctgagcgccctgcagtaggtggggaggtctgggcaggcggcatccagacacagtgtgctgagcacgcagtcagccgggggtaaggggacggcccccagtggctggctctgagtcacatcacacttcagcacctgcttgaccgcctgtctcaacttctcctccttctctggacccttgactctgttcccttcaagatcacacacataggtcaccactggggaccagtcaaagg

SEQ ID NO: 145 - DNA, 594 bp, Homo sapiens
aaaaatatgcagaacttatttcatctgtgctttagaaataactgtatacagtgttataagttgaaaagaactcaaaataactaataccaaatatacacctatgtattagaattcaaaaaagctgctttctgtgaagtcaatcagctatattaaaaaatgacacaaatccaaaacaagatgcatgttatatataaagggacattgtaagtttccttgctgcattaaacccatggtttaatccatgaaatttccttttaattatcatttagacagaagcatgcaaatagtctcaggatctacttaagaacctttcccaaatccactagttacactccccttttcaggaactaagcaggtattcgggtagctgcttcctcctctgcatcagctcggtttgcattaatttctgcaagtgttcggccaaaccgtgcccattcatcattgcggggaacagcaatctgctctcccacatcgtatataacaatctgtccttcagaatcacccacagcaatctctctgccagaatgggtccatctcacaccgattaagagcaggattaccctccacagaaatgctggcagttggtacctctgt

SEQ ID NO: 146 - DNA, 427 bp, Homo sapiens
aaagtattcttacattaactgcaagaaacaaaggagaaattccttcttttttgagatcacaactatgaagtcatatggttatacaaattctgcgtttgtgtgcaaaacataaaatacaattatctttattctccctgcttagttttgtcagtcagctagcaggatgtaatagatacctttccaagaaacagagactgagatgtgttttgtataacttcaataacctcagcactacagtaatgagagatgcagtatccttttgctatggttcaagacaagaggcaaggaggtcagaagaaagagaataaatcaaaatttttacaactgagtaactatttctcattaggtctcaccacggtgccaccttcatttttacataaacgtggtggcataattcaatctcaataaatcagaattcttaatattt

SEQ ID NO: 147 - DNA, 310 bp, Homo sapiens
  misc_feature 50: n = A,T,C or G
ctgaatggattctattctgaccaatacacacagaaagagatcacagactncctaccttagaagaagggaggtggtagatgaaatgaactgtatgaagagccactagcctggcccacacacagaagaaggactggcccgtcttcttgaagcccatgctctggtagagggccatagcagagagctggatggtgccggtgtccaggataacttcactgtagccctggtcccgggcaaactggaggacagtcctgaccagggcttttgctatcccctgacgacggtgctcactgtccacaaagagatgaaacag

SEQ ID NO: 148 - DNA, 226 bp, Homo sapiens
aaaaaaaatacagattaccaatttcaagtgctgccagctaaaataactgttttaacgggtatcttttgtttgttcttttcacttaattattttattgtgctttgcatctccaggcagttctctcacatttgggtaaaatgtttagcaggctgtaaacttaagaaaagggtaaaataaaattttctggagaggaacttggaatttgagggagattttatataccttt

SEQ ID NO: 149 - DNA, 582 bp, Homo sapiens
aaaaacaaaacaaaacaaaacaaaaaactccccttcctcactgcccaatataaaaggcaaatgtgtacatggcagagtttgtgtgttgtcttgaaagattcaggtatgttgcctttatggtttcccccttctacatttcttagactacatttagagaactgtggccgttatctggaagtaaccatttgcactggagttctatgctctcgcacctttccaaagttaacagattttggggttgtgttgtcacccaagagattgttgtttgccatactttgtctgaaaaattcctttgtgtttctattgacttcaatgatagtaagaaaagtggttgttagttatagatgtctaggtacttcaggggcacttcattgagagttttgtcttggatattcttgaaagtttatatttttataattttttcttacatcagatgtttctttgcagtggcttaatgtttgaaattattttgtggctttttttgtaaatattgaaatgtagcaataatgtcttttgaatattcccaagcccatgagtccttgaaaatattttttatatatacagtaactttatgtgtaaata

SEQ ID NO: 150 - DNA, 568 bp, Homo sapiens
  misc_feature 52: n = A,T,C or G
aaacctatgaaatctattctaaaaaaatcctaaggaaaaaaatatatgtatncacacacacacacacacacacacacacacacaaagataatcatcaaagcatgagttacaatatatgcttaaagcaatacacaaaatcatatatactatacaatatgatcatgtctatgtagaaaaactaaagaaaatatcaaactgtgaataatggggtatttttgcatggtagaactacagattattttgttttcttctggtttttcatattttataaattatctataatgaacacttacatttcctaactgcaaagaaaagtccaaacttctttaaggttcctgacacctgagagtaacagttctaaagttcaagttctagcatatatatctctacctccccaccccccacattaaaagatgaaataaaattaattattgtaaaatgttataaaaatgacccattatctattattcaaacccatctataaacttttttggatattaatctcgagtctttgtccagtccacgtcatacagttgtaaccagtgatcgttcctgctcttcagtcttt

SEQ ID NO: 151 - DNA, 397 bp, Homo sapiens
ccacagaaggtgaccactttgacgccgctgcggtacagcagcacgcacaggttggctgtatgcgacgcgtggtagacaaagtagtagaggccggggactttgcaggtgaacttgccagtgctcgtgtcataatctccctgcgggttggtgaggaccgcgttgaatctgatcaggctgttgggtgcagggggctggtgggtctgccgagtgaccgtgaacactgactggaatttctgcttgtatctgccctcctcacctggctctccagggatgcccatggggccgggcacctgggcttgttgtgtggttgcctgggtggaatcctgttcttcaagctctggtactgattcatcactgtcagattctgttccagaccctgtctcagcctggggctgcg

SEQ ID NO: 152 - DNA, 160 bp, Homo sapiens
ctgtgctctctctctcttttttttaattttattattattattttggcaacatgtacatttctaacaaagtttatcgtggctattaaagtgttttatttcccaattcatattactcttgtatcgagtccatgaggtctaaggcaacttagatcaaagtttt

SEQ ID NO: 153 - DNA, 354 bp, Homo sapiens
gcggtggctgagaaaatgtaaggattctggaatacatattccatgggactttccttccctctcctgcttcctctttttctgctccctaacctttcgccgaatggggcagcaccactgacgtttctgggcggccagtgcggctgccaggttcctgtactactgccttgtacctttcattttggctcaccgtggattttctcataggaagtttggtcagagtgaattgaatattgtaagtcagccactgggacccgaggatttctgggaccccgcagttgggaggaggaagtagtccagccttccaggtggcgtgagaggcaatgactcgttacctgccgcccatcaccttggagg

SEQ ID NO: 154 - DNA, 369 bp, Homo sapiens
ctggcaagaagaggaaaaataacacagaggagttatgaccagtgttgtaaggatctggcctagaaatggcatgcatctcttccactaatatcctattggtaaaaatgtagtcacatgggcacaccacctatctgcatggaaggctgggaaatgttgatcggtagggcagccatatgtgtaggaaggagaaaacagaatttggtggatacctagtagtctctgccatacccttgaccagaaatttttcttctaaagaatttaattctaaaagttatagacattcccaaagatatacctgcaagcatcacagctttgtgtataattgcaaaagttgaaatcaacatgaatgcccaaaatagtgaattattt

SEQ ID NO: 155 - DNA, 498 bp, Homo sapiens
ccatttatgctgacatgccatccttccagcaaacgtatgggaatgtgctttcaattgatggactactctattttttgcaaatttgtaaactttgcttctccaaatacaagtactaggttgtccatttatggtacctatttggtgctagtaaattttcaaactagatttataaatgcactgtaatatgtacacaacttagaaaccaaattacaagtattcagttccaatacttcattaatttcaatcaaccaaagttagttcagtagcttatctcagttatgagtataatacattacatgtaaattaagtgtgtgtatactgtaatcgtgctattttttatcattgaaacatttataaactagaataataatgcccttaatgtgagggtttgtaatggtgcttattaagaccaaagacttgttaaatgtatacaccaagtggtaatgaaatttctgtgactggcccacacgtgcatagaggtctgggaggaccaggaaa

SEQ ID NO: 156 - DNA, 270 bp, Homo sapiens
ccacagccccttggtcaacctgacagggggcctgagccacgcctctgacgtggtcctttaccatcagcacaagcagcccgaagtgaccaacccatgtgaccgcaagaaatgcgagtggctctgcctgctgagccccagtgggcctatctgcacctgtcccaatgggaagcggctggacaacggcacatgcgtgcctgtgccctctccaacgccccccccagatgctccccggcctggaacctgtaacctgcagtgcttcaacggtggcag

SEQ ID NO: 157 - DNA, 526 bp, Homo sapiens
ctgcaggtataggcagtgacaagtatctaattcttagaagaatcacttactcccacaatctgtccagacacattaatctaaggacaagtttataaatagcaaacgtgattttcacattgcagtgttctcaagaatgtatatacaagtgtgtagtcctgttgatgggatgtttccccgagttctttctattgatgcgttcatgctcttgaccctggtggagacagttctttctttccacagagcagattttcttttgtcatccaccatttacaatactctgtgaattagtattacttattacatttatgaaacggcaatatttggattgtaatagctcttcagtacaattccttgtgtcttctggtaagtctctgcactatcagagagcttttagttataatcattttcctgcaacaacagccaaactcaactattgagtttcagtgtgacacaccctctttgcagcttgctgggttaacccttggcttcaagtcctgatgatgtaatgagggtggggtgtattggc

SEQ ID NO: 158 - DNA, 573 bp, Homo sapiens
  misc_feature 544: n = A,T,C or G
cttctattacaggctgaagatgcattgtaaaaggtaatgctataatagtattccctcttctcaataaatgtgcaaaactggagaatctggtgctgatctgcagcatacttgacaacacagggaataccgtggatgttccacgccagccttacatccgtccccattgcctgcccatgtccagtggccctgcgcaacaaaagtaagggcttgtcttaccacactctccccagcatctagctcaaggtagatgactgactgggaaattccggttggataaaatggcttttccacattgcaactttgcatctctattaggaaaatttagattgaacctttcctctacttgatgcttagtttgagaacagttttcacaactttagagggtctctctcagagtatgttatactgtaaccttgaagtttgagatgaaacaaggtgtcagaggttttgaatctttcaaaggaattgccttttacagatttttttttattccctaagaagggaaaaagagagggaagaactacactaatgttagagataaggnatgttttggctcaaaatgtgtcatgaacc

SEQ ID NO: 159 - DNA, 578 bp, Homo sapiens
  misc_feature 577: n = A,T,C or G
aaaaaatataaattatatgaaaatacaagttggaaaatagtcaaacacaatataacatctttttcatccctatacttctcagcttaaaaaaaaagtattcttaaaaaaaaagttcaataactgaggcagtattcctgataattttattttaatatatatattttatatatgtatatgtatacatatatttatggttccttgaaacttctttggaatgtaggtaagagttcaacaaatttatatagaccccaacagagtaagcggcatgcacagcatgactagaagagagatggtgtatttctcaccatgaaggttaggcaggttaatgctgtaaaacccagagtgttcatctccaaagtgaggaaaagcacatctgatctttgaatgctacctccaatccccacagccacaaaaatcagggctctatgtaggggaagtccctctccagaatggagaagggaacaaaagcgactctgaaccctaaagccaaaaccaacaaaggttaaggcatctctgggaaaataagggtttcacccagctagaccagatttgcccatccttcctctgaagttaacgng

SEQ ID NO: 160 - DNA, 571 bp, Homo sapiens
atcgtgaagggccccagaggaaccctgcggagggacttcaatcacatcaatgtagaactcagccttcttggaaagaaaaaaaagaggctccgggttgacaaatggtggggtaacagaaaggaactggctaccgttcggactatttgtagtcatgtacagaacatgatcaagggtgttacactgggcttccgttacaagatgaggtctgtgtatgctcacttccccatcaacgttgttatccaggagaatgggtctcttgttgaaatccgaaatttcttgggtgaaaaatacatccgcagggttcggatgagaccaggtgttgcttgttcagtatctcaagcccagaaagatgaattaatccttgaaggaaatgacattgagcttgtttcaaattcagcggctttgattcagcaagccacaacagttaaaaacaaggatatcaggaaatttttggatggtatctatgtctctgaaaaaggaactgttcagcaggctgatgaataagatctaagagttacctggctacagaaagaagatgccagatgacacttaagacctacttgtgatattt

SEQ ID NO: 161 - DNA, 510 bp, Homo sapiens
ccttctttcaaggcaaattgaaaatcactggcaacatgggtctcgctatgaagttacaaaatcttcagcttcagccaggcaacgctaagctctgaagaactccctttggctacttttgaaaatcaagatgagatatatagatatatatccatacattttattgtcagaatttagactgaaactacacattggcaaatagcgtgggatagatttgtttcttaatgggtgtgaccaatcctgtttttcctatgctctgggtgaatagagcctgatggtatactactgctttgcggaattgcatacaactgtgcattacaaagttaatatggtaattatggtctggggtaaaattgagtttcagaataaaattaggaacagtaaaatccaaagaactatgtaaacaaaaaagcttttgttttgcttacaaagtatatttaaggattattctgctgaagattcaatttaagagttttccttgggagaactaagtaagaaacacaatgccaacag

SEQ ID NO: 162 - DNA, 591 bp, Homo sapiens
ctgtcttgggaatcatctcgggaaatgcagtgctgagctagtgtgccatggatggggggtctccaacagcccactccttccgaggaaggtggagctatgatgaaccagggcagccctcacccgagctttccacacatcctgaaatgcaagctgtacctgatggagctttgaaactaaaacccaaagtgcagatacaaaaggatcccctgataggaaaaagttttgtacataagctattcaagatttctccagcactgactgatacaaagcacaattgagatggcacttctagagacagcagcttcaaacccagaaaagggtaatgagatgagtttcacatggctaaatcagtggcaaaaacacagtcttctttctttctttctttcaaggaggcaggaaagcaattaagtggtcacctcaacataagggggacatgatccattctgtaagcagttgtgagggggtagagatgggacaaaattttggtctcagaggtcttaccatcttaatttggtaacttctaatgaaaaaaataaaaaatagaaataacattatccaaagatatcttaaagctgaaaacttgaactgccc

SEQ ID NO: 163 - DNA, 470 bp, Homo sapiens
aaaaaatagtttcttcttttatgtggattctcttaagatttgaagaaccaaactattctttggttttattatacgggaaaaacaacacgcagtctagttaaacaactttgtgatatttatattccattgcacagatatgggttatacaaattagtaacacaagttatttcttaaattccaaacattttctaaaatattattacagcagatgcctaggatattaaaacataaaggtggaaatcattctctaaatagttaaatatatttgacactgaaaatactgcacattttaattagaggaaaattaaaatgtgtgctcaaatgcactaacaaactaggtagcagggcaactaacaactacaaataagtcactgtggtccatttttacgtatgcatatatatgattattctctagataatccgtcttcttgaaaatgctaataaaacataaaaatccagataaatgattt

SEQ ID NO: 164 - DNA, 333 bp, Homo sapiens
aaatattttcatttcagtaactattaaaaataaattcacaattagggtttcaaatgtcctaatcatatctagtttgttctcatttaatattttatcaatcccatcatgtgcatacagaggttaaggtgatgtacaaattttatatctttcaaacacattgatgctaatcagctcttgatctaattactatttcatttattcagaaatagcatttagacataaaaaccaatgtctcactttgtaaaataacctttggctaatttacacacatctaatacagcgtgttatataagttttaagtaatacaatgagtcactactatcattcagtttt

SEQ ID NO: 165 - DNA, 338 bp, Homo sapiens
ccacttcctgggacctcacgcccctgttgacagatggagattgggtagcagggccttgctgcattgttatctgctgttccgacttggtttgtcttgtccaagggtgacgaaagagccaggcaccagggtctcatgggatgaggtacagggtgggagatgggggaggggctgggggctgaagggagcaagaaagctgtagctgtgtggggctggcaggatgttgaagaccgcctctgctgctctcacatggggactgggcccagatcctgcttggtcacacccagcccagaagacgggtcctccagttccagtgactcactgcagttatggtgcccgcg

SEQ ID NO: 166 - DNA, 428 bp, Homo sapiens
aattctttgccgcaaggctgatctgctttcattaactggaattctgtaggagatactggtgacctaagctaagttgcactcagcatactcagtgtcaagctaatgaggttctattataaaggttctacttttaatctgagggaaaacatgttcagggcttctagaacactaaaaaatttggcttaaaccagtgttcagtctggtgccaaacttcgaatggaatacaaattcacataatctgaactttgttcacaggttatcctaatagagtaattcttcactttgctctattgaactgtcttaaggatttgtttaaacagctaagttacttgattaaaataatgataaaattgtattttgtctttgctttaatattaaagttaacaagttttcattttaacaaaaaaaaaaaaaaaaaaaaaaaaaaa

SEQ ID NO: 167 - DNA, 424 bp, Homo sapiens
caaaattgggaaaggagtagaaaaagcagtaactgacaacttgaataatacaccagagataatatgagaatcagatcatttcaaaactcatttcctatgtaactgcattgagaactgcatatgtttcgctgatatatgtgtttttcacatttgcgaatggttccattctctctcctgtactttttccagacacttttttgagtggatgatgtttcgtgaagtatactgtatttttacctttttccttccttatcactgacacaaaaagtagattaagagatgggtttgacaaggttcttcccttttacatactgctgtctatgtggctgtatcttgtttttccactactgctaccacaactatattatcatgcaaatgctgtattcttctttggtggagataaagatttcttgagttttgtttt

SEQ ID NO: 168 - DNA, 484 bp, Homo sapiens
ccaagaccccaggcagaggcagaacttctgcagccagaacccggcttggatgcccactttgtagcttctccttctccattctcagtcagaccccctgggatgaaggggagggcaggggtggaggcaccttgaggccaagccaacaggtgggggtgctgcttgctcactcttgcatccctagctaggtcagcaccagctcctctgggccccaggacagtctgtggagcctgctcctcacctgccctgggagcctagggtaccaagggtaccgaggaagccatgggtagtggggacaccatgggtactgagggtactgagggtcctgagggcttgaaggtggggtcctcagggatgtagacagtgctgttcccttcaggcatctcccagtagaccgcatcctcaaagcagttctcatctgaaggttgtccccagaatggtaatctcaaaatgagccccacaatgatgccacccatcagggccatgg

SEQ ID NO: 169 - DNA, 611 bp, Homo sapiens
  misc_feature 575: n = A,T,C or G
aaaaacattggcagaagcttctgtgagtttagtttcactaagatgtttcacctgccttatcaagaccattctcagtctacttttttaagctaccgtatcttaaattattgaaaatttattaattgctgaatatataataacctttgcttgtatgtaaccgaaaatggtttaagagccaacatttagagtatgacaatggagctgaacagtttttaatgcgcaagcagttctgttcttgtgtatgacttgtaaccttaatttactgtgtaaagatggttacattatttccttagctttgtttgttggagacaaatagagaatgcttgttaagtatgtcaaaacaatcttatcttgtgaatttttgttaatgtattatacgagctatatttttcatttgcccagaaagacagcttgtataacgcttttggaagtttctgctctgtaatgtctttagagctgacagtctgttaggtttgtttttttcttcatgctaaagtgtcagttggtggttttgtgaactggtcaaaaattcacaggtcttaaatgttttgggggaaatttatattggacactgntctttgtctagcaaataaaagatgttaatatattcc

SEQ ID NO: 170 - DNA, 216 bp, Homo sapiens
aaaatggtttcacctgttaaagggccaacagaactcttggttttacttttgtaattactgtacagaaaatttcaagagtgtttgagtgcttgtcatcaggtgttttccttaataagtagggatatgatcatttacaggaattatatatgaaaaaagtttttgaaatgtatttttgtgatgtgctatgttgaggggaaaccaaatatttatgatttt

SEQ ID NO: 171 - DNA, 518 bp, Homo sapiens
aaaacaaacaaaaacccacaaaacaatcccaagttaattcctatagacaacacaaaaaagggggaaaaggaaattcttttccctgctttcaagctttattacacaggttcaaaaatgattattttatgccatccttaagtcaaagaacgtactgccaagcttctctgcactaagtcttaggacatgttaatgttgccaagtcaaatataaatatagtctcaatgacatcacaatttacaaatgcatattccaagattaaaactgaatagggggaaaaaccccaaatgttttagaatacagtttaatcaaatgagttaagtgaaataagaaacatttaatttagtaggcgatcctgttaaataagaagtttgtgtaggaaatataatcaaacagaactaaaaatcacgtctagtaaatgacacaaataatttctcaaatctttaagtctgacttaagttcaaagtctagctggtggggattaacaatctatatactctttatactaatcttagaacttt

SEQ ID NO: 172 - DNA, 477 bp, Homo sapiens
aaaattcactaatgattgaggtccatatttagtggtactctgaaattggtcactttcctattacacggagtgtgctaaaactaaaaagcattttgaaacatacagaatgttctattgtcattgggaaatttttctttctaacccagtggaggttagaaagaagttatattctggtagcaaattaactttacatcctttttcctacttgttatggttgtttggaccgataagtgtgcttaatcctgaggcaaagtagtgaatatgttttatatgttatgaagaaaagaattgttgtaagtttttgattctactcttatatgctggactgcattcacacatggcatgaaataagtcaggttctttacaaatggtattttgatagatactggattgtgtttgtgccatatttgtgccattcttttaagaacaatgttgcaacacattcatttggataagttgtgatttgacgactgattt

SEQ ID NO: 173 - DNA, 411 bp, Homo sapiens
  misc_feature 222, 244, 254, 298, 338, 355, 366, 370, 379: n = A,T,C or G
aaatatgtgttctagggctgtttgttaattctattatggtctttactaattgtgattcccagttctgggtgaataaaaagtttttgttttaatgtaattgtgatcaacactatgcttgaagacatagacaaagctatttctaccaccatgatgtttacaaaatatctggtattttcgcctatatggtacaagcttttttttttttttttttttttttttttngactgaaaactttttattgctnttttggatanaaacgggaatttatttgccaggaaggatgatcccatcatacttntgctggaaccagcgcatggcctcctctttgctgattctgngtttggccccaatgcancctgtcctgcncttnttgtctgcnatgctgaaacctggcctacccagcaccacata

SEQ ID NO: 174 - DNA, 491 bp, Homo sapiens
ccttatcacactgtaagtggtccaagcccatagggatgctctttttggttcctggaatttccagttggatgtgacagagatctttcagtataggtctaagtcaagagtagcctctgggttgaggtgggctgggagattaacatcttacctggggtccttcagataaacctgttggtttttcctgtctcatacagacccatcttaagttttgatgttgaattaaaactacttctacccccttagttataaaaaaggccacaaggagcatttatgtggatatctggaagtgagatagttattccattcccaggaaaagaaaaataaagctaagttacaaaactaaatctatatgcaataaagttattatatactgctttgtttaagcagagtcctctggaatttatgtacagtacattagttttcagctatttatattccacagttagaccttaagattctctggttttaagacaattgttaaagatactttt

SEQ ID NO: 175 - DNA, 389 bp, Homo sapiens
aaaatattttaatcaggcagagttttatggatagagaatagaagagaaaggtagtaaatattgaacatattccaatataggaacctatctctgttttagtacaaaatatttctgacatctgaactagaggtcaagagaataaattcatttgtatacatctgagcaacctgtctttcagatgataaagtatctagccttttctgacaccataatagttcattttatagggaataagccattaggtgtatataattgctttctagaaatgacctaatgtccccaaccactgtgtagtggcagatcactgtttcacagcatattttctcccaaggaaagtattcaaaagagactgcaactaacaagactcttatttcatcaaaatttacctg

SEQ ID NO: 176 - DNA, 473 bp, Homo sapiens
aaacaatgtccaaagtgtaactttaatgttatattttgtttcaaaccctctggtctaagattattgagaaagatgttttttcctcctccctcaaatatgttatctcttcatatataaaaaaataagttattccatgcttttcaggaactgtaaaaattatttcaaaaagatatttgaaaaagttttctctattctggacacaaatgcttccatttatttcaaaagaagaagaagaaaaatggaatcttaatttaaaaaatcttctctcctcataaatcaggtagggactcttgaccctctcctaagtctcaaatcagggctattaaaaggaaccactgtttttatttttttcagtagcacagaaatctacgtagtacttctgccaaatgccacatgagagcagtggcagaatacagagagaccggcgaccacagcaaggaactgtaacggccaacagtcctcaggcatgcagg

SEQ ID NO: 177 - DNA, 282 bp, Homo sapiens
acctgtggcaggaccgtcagtcttcctcttccccccaaaacccaaggacaccctcatgatctcccggacccctgaggtcacgtgcgtggtggtggacgtgagccacgaagaccccgaggtccagttcaactggtacgtggacggcatggaggtgcataatgccaagacaaagccacgggaggagcagttcaacagcacgttccgtgtggtcagcgtcctcaccgtcgtgcaccaggactggctgaacggcaaggagtacaagtgcaaggtctccaacaaagg

SEQ ID NO: 178 - DNA, 324 bp, Homo sapiens
aaaataaaactttatgaaagaaaaaacttatatgttacagagaagctaaagcacctgtaatgctaccagaaagttatcatttatgatatatttcatgcacagccctaatttctcggtgtaatatttctgatactttaagtgatcgtttattttaattaccataatttctaatgcactgttttatccttagctttgtttgttattatgttttggaatgaaatttggtcagataatatgattacggtgagttctgtaacagctactggtaatatttttgtaaatcacgtgaaagcattggagcaactgtcttggaaaatgctcttt

SEQ ID NO: 179 - DNA, 376 bp, Homo sapiens
aaattcatacttttattattagggggtaggtaggggtcattttgttgtttatgtacacttcatattttttcaacgaaagacaaaataagattaataaaatagaaatatatgctcagtgttataaaattaaaaagtagttgttctaacacttaaggctattgcagttgctgtatttaaggaataaatttgaccttgagtttcctgacagcgaaggtaaaaatggaacatgatgttgtggttaatacagttatataacgaatcacccccaaaacttagagtaagctgaaaacaaccacttcttacgctcatgcgcatagcagagataacttaatcatcctgttcacaaggtttggagctcagcaggaagattcaacag

SEQ ID NO: 180 - DNA, 617 bp, Homo sapiens
  misc_feature 455, 539: n = A,T,C or G
gccgtgggaaggacagttatgaaacgagtcagctggatgaccagagtgctgaaacccacagccacaagcagtccagattatataagcggaaagctaatgatgagagcaatgagcattccgatgtgattgatagtcaggaactttccaaagtcagccgtgaattccacagccatgaatttcacagccatgaagatatgctggttgtagaccccaaaagtaaggaagaagataaacacctgaaatttcgtatttctcatgaattagatagtgcatcttctgaggtcaattaaaaggagaaaaaatacaatttctcactttgcatttagtcaaaagaaaaaatgctttatagcaaaatgaaagagaacatgaaatgcttctttctcagtttattggttgaatgtgtatctatttgagtctggaaataactgatgtgtttgataattagcttagtttgnggcttcatggaaactccctgtaaactaaaagcttcagggttatgtctatgttcattctatagaagaaatgcaaactatcactgnattttaatatttggtattctctcatgaatagaaatttatgtagacgcaaacaaaatacttttacccacttaaaaagag

SEQ ID NO: 181 - DNA, 168 bp, Homo sapiens
tcaacttcaagaataaaatacaggtaaatactgaaataattcttaaataagttcttcacttcaaataaaatacttctgagatatttcctaagaacatctagtacaacagtcctgtttgtgctaagattctttcaaatatactcctaattccacttatcaaccaagttt

SEQ ID NO: 182 - DNA, 343 bp, Homo sapiens
aaaacagagaatttcatattgattaacacctactactaaacagaatgatgcattaattaaatgccttgtcctaactgttataagctctgttagaaaaataaacatctcaccacaaactacagtgtcagctctttaataaatacataaaacagaagttagtagtcaatcagagttatatgaacaggttcatagtatattatgtgaaagtatcatattctccaatattctgtatcatttaagacaatttaagttacgtataattcaaagccagaaataataagaaatatgttcagtgataatttgcttctttcttagagctattttatattcaaatatttaattt

SEQ ID NO: 183 - DNA, 606 bp, Homo sapiens
  misc_feature 535: n = A,T,C or G
aaagatatatgtgttcatgtattttctgaaattgctttcatagaaattttcccactgatagttgatttttgaggcatctaatatttacatatttgccttctgaactttgttttgacctgtatcctttatttacattgggtttttctttcatagttttggtttttcactcctgtccagtctatttattattcaaataggaaaaattactttacaggttgttttactgtagcttataatgatactgtagttattccagttactagtttactgtcagagggctgcctttttcagataaatattgacataataactgaagttatttttataagaaaatcaagtatataaatctaggaaagggatcttctagtttctgtgttgtttagactcaaagaatcacaaatttgtcagtaacatgtagttgtttagttataattcagagtgtacagaatggtaaaaattccaatcagccaaaagaggtcaatgaattaaaaggcttgcaactttttcaaaaacctgttagaatatactttattgngttttgaggagttttccttttttcttttcaatatcactttatcctccagtatttcctcataagggttatta

SEQ ID NO: 184 - DNA, 278 bp, Homo sapiens
aaaaagcttctccttattatgttgttgtttaacaacttaaacgctatctctagaccaggaataattatttgctatataatacagcaaaaaatatgtatgtataaatggactcattcaaaatatataaagaactcctattacaaagaaattgacaaacagcccagtatatcaatgaatataaaaatttgagaagatattttccataagaagatatctaaatgaacattaggcatgagaaaaccaaattttaggatatcactacacacctggtgtagttt

SEQ ID NO: 185 - DNA, 389 bp, Homo sapiens
aaataaaaatctatttactttctccattttagcaaatggtttctttacccaaataggttgcactatagtccccatatggttttctactgttccacaaccactatttcacaaagattgacaaaactttaataaaagttaaatttacagacatcttaagataacttgggaaatatgtagtaaaaaagaatcgagtccacaaattaagaatattttgctaatatgcccaacaccaatttcagcaaatccaatctacttaactcatatatttaatgtggtaatttttctaacaaaatttaatgggggtatgaatgatatatttatgcccttgacaaagatgacatgtgtgattttgttgtgactaagaaaggagagtatgatttctggtggtt

SEQ ID NO: 186 - DNA, 607 bp, Homo sapiens
  misc_feature 538, 544: n = A,T,C or G
ctgctagcaagtagtcgagaactagtctattttgatagatcgcatttctcatcagagtctcttgacgggcaagaacagtcaaggcttgatcggttttattagtaataatttctaaaacagcttgtaaccgtatgattcggttgagcatttagatgggggtctagtatcttcatgagccatcttgtgcccaagtggcaggtccatagtattgtatgattttttcagggggccatttattatctttttaatcacctatggctatgcttccttttttgtgggaagcatagactgggaagcctagaagtttacctgtttttatgggcagtaagaagaaagaaggcttaatggtgccaattgcacagctacctctccactgatcaggcagcttagcataagctctgtgtctacatatctagtataacctggtggggaccatccagtcctggtagaattctgggtgggcctaaacagtatgcaactttggaaatttactgaatggatttctttctgtgtaattggaactccaccatgtaactgnttttgnggtactattatagagcttttgtctaagacagctaagctgccttacaggatgagcgaatccttt

SEQ ID NO: 187 - DNA, 430 bp, Homo sapiens
ctggagttttcttacgttaatacattaaaataacctgaaggaaactttcgttatgggccaatattagctcttatggaaactgatttatatcttttttatgacctttcaaaagtaaaatactatgcataatctggaaagatttgtcagataggaaattttataatgcattagccattagtcagagttgttttttaacatgccagagaaaaagttgtaatgccttggaagttattctcttttctatagattgtgttcaaaagatgtgtatacttgcaataaggtttatgttaaggtggctttaacaattggttgctattttccttctttagtcaatgtgactttgatgtcattaactgctaagtgttattttctaagaggaattttatcttttttttaaccttattaaaagcctttgaaaacacaaaaaaaa

SEQ ID NO: 188 - DNA, 510 bp, Homo sapiens; identical to SEQ ID NO: 161

SEQ ID NO: 189 - DNA, 426 bp, Homo sapiens
  misc_feature 81, 173, 238, 333, 367, 371: n = A,T,C or G
cttttttttttttttttttttttttttttacttctagtttagtttatttctagttcaaaaataatctgtaattgctgtaanaaatgtcaaccacttacctaggatgtttgacaattgggatgaagtctacatatactaagtaatggcaagacaattattttattgctcaaaanaaagtcaaaaaaattccatattccctttggggaaaattggcaggatttcaagtatgacctttaanaatcaggaaaagactaacttatgctttaggattaaaacaatcaaataattaaattagttcaattttctaacatagtctctatcttcagttaaagngcatcattgcatgttatacattactaaaattacncagngcataattgttaccatgtgactatttaattcagggtcaactgtctaaaggtctca

SEQ ID NO: 190 - DNA, 133 bp, Homo sapiens
  misc_feature 14, 33, 37, 44, 51, 60, 82, 89, 97, 99: n = A,T,C or G
gcctttctgcagtntttcaggagcgcaagatanattnggaatangaataanctctagttnttaacaaccgacactcctacangatttanaaaaaagntnacaacataatctagtttacagaaaaatcttgtgc

SEQ ID NO: 191 - DNA, 520 bp, Homo sapiens
aaaatagagttttctgcagtatgcttttagtctaagaaaagcacagatggagcaatactttccttctttgaagagaatcccaaaagttagttcatcttaaagtgcaatattgtttaatcttaaaactgggcaactttggaagaacttttaacagaagcctcaatgatgatcactttgaattgcttgtgatttcaaaaataaagcagtgaagcaatacttgtgtacactggtactttataatgctaactataaactggtttattgttgttagacagttactatattagttggaagatttgccctttaagtacacactggctagttacctagccagtgtgtacttaatgagtccagtttttggcatttctaagaatcttaatcataccattatttccataggaattaaactgaaggtattttctttagtacctacctttcatctagttctaaaactgggatgcctgccatgctttccacaaactctccatttattgaaacaaagtggcatttattttcccag

SEQ ID NO: 192 - DNA, 470 bp, Homo sapiens
aacgcctattttttaatgcttagttttggcttgaaattcttcttcacctggagttttcttacgttaatacattaaaataacctgaaggaaactttcgttatgggccaatattagctcttatggaaactgatttatatcttttttatgacctttcaaaagtaaaatactatgcataatctagaaagatttgtcagataggaaattttataatgcattagccattagtcagagttgttttttaacatgccagagaaaaagttgtaatgccttggaagttattctcttttctatagattgtgttcaaaagatgtgtatacttgcaataaggtttatgttaaggtggctttaacaattggttgctattttccttctttagtcaatgtgactttgatgtcattaactgctaagtgttattttctaagaggaattttatcttttttttaaccttattaaaagcctttgaaaacgca

SEQ ID NO: 193 - DNA, 362 bp, Homo sapiens
aaacgtggggaatagaagaaacttgccaggaggtgcagaaaggaagtggcagcgctggaattcaaacccaggcaaaggagcaccttttacctggggtaggagagagcttgctgggtgggcttcctccacgcagggaacagcagagatggggcttcctccccatctcccaggataaaggcagaggcagctctggaagaggagctgttgccaccgttgttttacaaacaggacccctgggcttccctcttcctccagagagaaggatctggggccttgctcagtacctgacatggagggtggtctaggtggggttttagaagccctggggccaccctgggcactctgccctatcctcaggatgg

SEQ ID NO: 194 - DNA, 342 bp, Homo sapiens
aaacaagtttattgtcgaaagtctcacaccttcatcactatccttgatgcattcacctcccggcactcagaatataagtgagatcaacttgagtccaatggaaatcagcacattccgaatccagttgaggtgaacctgactttcacatttggattgagaatcattggcttttatacctttcgtggtttgacgtgcaataaagaagcacattattttagcttctggctactgtgagaacatgaattctgtgattctgtgggttttttcttttttcttttaccagtacagtaagaaaaaaaaaaaaaaaaaaagccatgctatcaatcaagattcttttttttt

SEQ ID NO: 195 - DNA, 592 bp, Homo sapiens
cgacaatttccctacagatgggtaccaacaaagttgcttcccagaaaggaatgagtgtgtatgggcttgggcggcaagtatatgatcccaaatactgtgctgctcctacagaacctgccattcacaacggaagccaaggaacaggaacaaatggttcggaaatcagtgatagtgattatcaggcagaataccctgatgagtatcatggcgagtaccaggatgactaccccagagattaccaatatagcgaccagggcattgattattagatccacacagaaggagctcagtatttagtcctttgtttttattcagtgagaaccaagctagccttgagtaatttttatcttgtcttcctaaaacactattaagcttattgtacttttaagaaaaattgccttacgtacattcctttttcctttttctgcctcttccctcaatagttgccttttagtgctgtaatagttaaatcctacagcataatcaataactcgcatatgaagtaaaaaggaatactgtgaaaggggagtactcttgtacagccagttcttttatgcaaaaatctatgcatttttacaatcttatattaaac

SEQ ID NO: 196 - DNA, 272 bp, Homo sapiens
aaaaaaccgagtgtggaaacattgggtcttaattcaacacaggatcggtaaaactgttgtaaatactgagaaacattttgaatgttcttcatcttattactaatccatgcaaaaaaaaaaaaaaagcagcgactaattgtgatgcattcagatttcagtattcagtactgtatatttcaccctgtgtaatggggccccctctcctttctctctttttgtattgtatgcgactctgaaactgattgagtcatgaaaataatttgtggcggtga

SEQ ID NO: 197 - DNA, 343 bp, Homo sapiens
  misc_feature 322, 329, 341: n = A,T,C or G
ccttctttccccactcaattcttcctgccctgttattaattaagatatcttcagcttgtagtcagacacaatcagaatcacagaaaaatcctgcctaaggcaaagaaatataagacaagactatgatatcaatgaatgtgggttaagtaatagatttccagctaaattggtctaaaaaagaatattaagtgtggacagacctatttcaaaggagcttaattgatctcacttgttttagttctgatccagggagatcacccctctaattatttctgaacttggttaataaaagtttataagatttttatgaagcagccactgnatgatantttaagcaaatntg

SEQ ID NO: 198 - DNA, 306 bp, Homo sapiens
caaagctttattttcatctctcatcttttgtcctccttagcacaatgtaaaaaagaatagtaatatcagaacaggaaggaggaatggcttgctggggagcccatccaggacactgggagcacatagagattcacccatgtttgttgaacttagagtcattctcatgcttttctttataattcacacatatatgcagagaagatatgttcttgttaacattgtatacaacatagccccaaatatagtaagatctatactagataatcctagatgaaatgttagagatgttatatgatacaactgtgg

SEQ ID NO: 199 - DNA, 584 bp, Homo sapiens
  misc_feature 556, 577: n = A,T,C or G
ccaagacagcctgtttcagagggttgttttgtttggggtgtgggtgttatcaagtgaattagtcacttgaaagatgggcgtcagacttgcatacgcagcagatcagcatccttcgctgccccttagcaacttaggtggttgatttgaaactgtgaaggtgtgattttttcaggagctggaagtcttagaaaagccttgtaaatgcctatattgtgggcttttaacgtatttaagggaccacttaagacgagattagatgggctcttctggatttgttcctcatttgtcacaggtgtcttgtgattgaaaatcatgagcgaagtgaaattgcattgaatttcaagggaatttagtatgtaaatcgtgccttagaaacacatctgttgtcttttctgtgtttggtcgatattaataatggcaaaatttttgcctatctagtatcttcaaattgtagtctttgtaacaaccaaataaccttttgtggtcactgtaaaattaatatttggtagacagaatccatgtacctttgctaaggttagaatgaataatttattgnatttttaatttgaatgtttgngcttttt

SEQ ID NO: 200 - DNA, 277 bp, Homo sapiens
aaactgcagcctgatcaaatgtttcaaaagttgttcaaaagtaatcttagtccaacactgctcctctgacttttatctagagaaatagaaaagtttatatattaacgatttgtttcttttaagtacttgtgtacatttttctcttgcaataagtattaataattgaaaattattaaattgtcattttaatgttttttattaagtaagtttgatatgtttcttagcaacgaagacctgtggctcaaataggagcagacaattcatggaatcaaatttt

SEQ ID NO: 201 - DNA, 549 bp, Homo sapiens
ccagtcaaggttgaaacggccattttgttatttctaacttctgctctagggttcagaaatgattttgcatctgatcattcaagatgagaatttgtttcacctgtacctgacagaataaaatggtaaattagcaatcagatcaccctttgtcaaaagaagtatgttctaaatgtatacactacaaactatctaataaatgatatctgcatactacatatttcatgttttattatgcaccattttagtggggaggaaaaacttcacagggatttattcaaaggatataaataatatcctaagaatgttgatttatacatatgagttctgtataaactgttaagtggtcatcttagctaaactataacaagcccctataatgtaaaagctgactcgaaaggcaccatgtaaagcactgaaatccacaatttagctgttatttcctcttctccaatacaaaattatctggtagtcttcactgttgattccatgataaaatgttccaaattcagactgctttaccgacaaaaggaataggaaataaaagttttt

SEQ ID NO: 202 - DNA, 269 bp, Homo sapiens
  misc_feature 45, 80, 84, 124, 187, 210, 220, 223: n = A,T,C or G
ctttttttttttttttttttttttcaaaataacatttttattatntaaaaatgtaaaaatccagcaaaaccagaaatacnaatntatttttctgggctttcacatttgttgatttttattcgcnatctttttcaatacaatttacaccctcatccccatttccagtctgattatacaagtgctaagnggcaaaaaggtctggaataaatncatcaaaaanaanaggcaaagctgtgaaactaagttgcatgcaacaggttctatgaggg

SEQ ID NO: 203 - DNA, 557 bp, Homo sapiens
gctacccactgccagatgctgcaagcgaggtccaagcacatcttgtcaacatgcattgccatgaatttctaccagatgtgcttttatttagctttacatattcctttgaccaaatagtttgtgggttaaacaaaatgaaaatatcttcacctctattcttgggaaacaccctttagtgtacatttatgttcctttatttaggaaacaccattataaaaacacttatagtaaatggggacattcactataatgatctaagaagctacagattgtcatagttgttttcctgctttacaaaattgctccagatctggaatgccagtttgacctttgtcttctataatatttcctttttttcccctctttgaatctctgtatatttgattcttaactaaaattgttctcttaaatattctgaatcctggtaattaaaagtttgggtgtattttctttacctccaaggaaagaactactagctacaaaaaatattttggaataagcattgttttggtataaggtacatattttggttgaagacaccagactgaagtaaacag

SEQ ID NO: 204 - DNA, 458 bp, Homo sapiens
aaattcttatatttacttttctctcagtaaattgttaaattttcactcagcaaaagattggcatttgttaagtgttctatatttagtactaaaatcacagtcatgaaatcatagtcataaaatggtcttcacacagcagtcatccgtgtcatttatcattttgtaatattaaattatggcaattttatttcaaactaaagtttgaacaccggaaagtcattactcagtgatttgtaatttgggacttggattatttatctagagatgtttgtatattttgtcagtaactaatactacgctgccatcatggtgactgtcatggttctacagaaatgccctccatgtgtccctctaatgttgcatgtttcagtgggttggaagttttgtatatttattgtattaacacagagtgtcataaaataaaatgctgtttactgaaaaaaaaaaaaaaaaaaaaa

SEQ ID NO: 205 - DNA, 481 bp, Homo sapiens
ctgactcatgtgaaaaaggcactatgaaaattaatgaatctagataatttctctaaatgatttatgttaaaatatacaacattcttacataacatctgttttatatatgtgaaataatataacatttaatgacaaaaattgtgtttccaaaaataacatttgttgaaggttaggtatctttcttttctctatgtggaatctttcacaggattaaaatatgtgtaaattaagtgcttcttattaccagaaatacttgacacagataaacacataaaatggccccacttccttttaactactcatatcaacattcagaactgaggctttcattaagcaaaatactgtaatgcacaccaatgcagactacttcctttgctagattttgagaagacatgacctctttcgcatttgtgctttctcatatataagaacacagtatacataataagcagaatataaactaaatcaaaatacaagctat

SEQ ID NO: 206 - DNA, 569 bp, Homo sapiens
gtgatggctacggcttcaccaccgacctgttcgggagagacctcagctactgtctctccggaatgtatgaccacagatacggcgacagtgagttcatagtgcagagcaccacaggccactgtgtccacatgaggggcctgccgtacaaagcgaccgagaacgacatttacaacttcttctctcctctcaaccctgtgagagtccatattgagattggcccagatggaagagtgacgggtgaagcagatgttgagtttgctactcatgaagaagctgtggcagctatgtccaaagacagggccaatatgcagcacagatatatagaactcttcttgaattcaacaacaggggccagcaatggggcgtatagcagccaggtgatgcaaggcatgggggtgtctgctgcccaggccacttacagtggcctggagagccagtcagtgagtggctgttacggggccggctacagtgggcagaacagcatgggtggctatgactagttttgttaggaacatttgagttacttcaatcattttcacaggcagccaacaagcaattaagagcagtta

SEQ ID NO: 207 - DNA, 361 bp, Homo sapiens
aaatcagaactctgccaatgcttttatctagaggcgtgttgccatttttgtcttatatgaaatttctgtcccaagaaagacaggattacatctttttttttttttttagcagtttgagttggtgtagtgtattcttggttatcagaatactcatatagctttgggattttgaattggtaaatattcatgatgtgtgaaaaatcatgatacatactgtacagtctcagtcccataaaattggatgttgtgcctacacacaggatctagaagaatatgtcaagctataaactgcttgtgattgtgaatgactttgttctttgcttgtgtttttcaatttcctataatgcacatactaactttt

SEQ ID NO: 208 - DNA, 484 bp, Homo sapiens
ccaagaccccaggcagaggcagaacttctgcagccagaacccggcttggatgcccactttgtagcttctccttctccattctcagtcagaccccctgggatgaaggggagggcaggggtggaggcaccttgaggccaagccagcaggtgggggtgctgcttgctcactcttgcatccctagctaggtcagcaccagctcctctgggccccaggacagtctgtggagcctgctcctcacctgccctgggagcctagggtaccaagggtaccgaggaagccatgggtagtggggacaccatgggtactgagggtactgagggtcctgagggcttgaaggtggggtcctcagggatgtagacagtgctgttcccttcaggcatctcccagtagaccgcatcctcaaagcagttctcatctgaaggttgtccccagaatggtaatctcaaaatgagccccacaatgatgccacccatcagggccatgg

SEQ ID NO: 209 - DNA, 571 bp, Homo sapiens
aaaaaacaggtgttaagataggacaaaaattacataaaaattaatgatatttcctttaatcatctgtatttgaagaggtacgtttttctcaatgtaaaaattaatttgttagatcaagtaattatctagtgtcaattttcaaataaaagaataggtaatggaagttataaacttaatgatttattagggcacagtacaggttcttaaagttaaaaaatgtcttttaccaatctctttgaacagtgagaaatgtctatccaccgaggggttttcctccttaccttcccccaagacctggatttttccccccacccccacattctgaaggtagaagtgagttcccctcaggtttgattccaccttcaaatgagcctgctactgaacatccagaaccacagcaagaaacctgacaatatttttgctctcttcaaaagtaattttgactgatctcactttcagtttaagtaaccgctgttacttaagtgattacacttttgctcaaattgaagcttaatggaattataattctcaggatagtattttgtaaataaagatgatttttttgtacaag

SEQ ID NO: 210 - DNA, 329 bp, Homo sapiens
aaagaaaatttgtaaaactaaagactttttgaaaaaaagctatcttaagtgctttttctttatttacaagacatttcccccagtggtagcatctgaagtattggagtgtttctgccacgaagcaaagctccattcatggccgtcatggaaggttatttattaatgttacataatggtagaatattactagttagagggttggatttgacttggtcctaaggccacagaatctctctcatggcttcctaagggatgtacctttatgcttttaagaactacaaagattcaataaagaaagaaatgtttttgaaactatagaaaaagatttt

SEQ ID NO: 211 - DNA, 587 bp, Homo sapiens
ctgcattagaacccatctgggattgtgaggggactggagagggaggggggagaagacccgctctccctagcttttcactatatagagtaaaaacatcagaaatcaccccaagagaaaggacataccaaatgcccaccagaagggccagggactgcaagccaccctgagcgcaggagggtgtggtgaagggtggtatggccccgaaatttgtgtgtgtcccccactccccctgcaaattcacattggaattctcacccccaaggtgacagtattaggaggtggggcctttggagctgattgggtcatgggggcggagccctcatgaacagggttggagtccttataaaagaggcaggaaggagcttgcttgtttgtgcttctaccattgaggatacggcgagaaggcaccatctatggatcgggaaacagccctcagcggagtccgaatctgctggcctcttgatcttggacgtcccagccccccaggactgtgagcaatacgtttctgttgtttgtaagccacccggcctacggcattttgatataggagctcgctggactaacagtggggccaagcaggctctgtc

SEQ ID NO: 212 - DNA, 618 bp, Homo sapiens
  misc_feature 116, 317, 543, 593: n = A,T,C or G
ctggcaattttataaatcaggtaactggaaggaggttaaacacagaaaaaagaagacctcagtcaattctctactttttttttttttccaaatcagataatagcccagcaaatagngataacaaataaaaccttagctattcatgtcttgatttcaataattaattcttaatcattaagagaccataataaatactccttttcaagagaaaagcaaaaccattagaattgttactcagctccttcaaactcaggtttgtagcatacatgagtccatccatcagtcaaagaatggttccatctggagtcttaatgtanaaagaaaaatggagacttgtaataatgagctagttacaaagtgcttgttcattaaaatagcactgaaaattgaaacatgaattaactgataatattccaatcatttgccatttatgacaaaaatggttggcactaacaaagaacgagcacttcctttcagagtttctgagataatgtacgtggaacagtctgggtggaatggggctgaaaccatgtgcaagtctgngtcttgtcagtccaagaagtgacaccgagatgttaattttagggacccgngccttgtttcctagcccacaagaat

SEQ ID NO: 213 - DNA, 362 bp, Homo sapiens
cctggttttgggcctggcaccaggctgcctgtctttggttttacttccttgtcactttttcttaaaagaggtactgagtataaaacaatataaaacaatatgagagggtctctctctcttccctcatttcccccctttgagactctcagtttttattagtgggagttctgagtcttatttttgctacttatgtctttttgtgcaatagattgatagtgatttatatagtatgcttctgctaaagcattttggtgaactaaggtcgtgacaaagttttttatcatttggagaaatacaggtatcagacaaaggagcagtaagcaggtttctattactattattactcttattataagagtttt

SEQ ID NO: 214 - DNA, 468 bp, Homo sapiens
ctggaaaaagccagtgattttactatctacctttgagaactatagcccatatttttcaattatttagttctatatgcagaaaaagttattacatttgcaaaactcatttttgtattttctctcttttgtcaaaatgtgaatcagttcagctacaagtgacagacatacagtgcagttttataccttcaaaatggattattctctgtgatcagcctattaggaaagccttaaaaattcagaatcaactgtggtcagaatttttgttacatcttcaaattaaacttttccattaaatcttaagatagctttactgctaaacatttatcatatcatacacaattaaggtgatagctgaacaacagtgatttccatggtaaattttaatattacaacaaaactctgatatttaagttatttaagagtagtccttaaagtgtttctaagaattggtatgtattctttaatttt

SEQ ID NO: 215 - DNA, 373 bp, Homo sapiens
cctccaaggtgatgggcggcaggtaacgagtcattgcctctcacgccacctggaaggctggactacttcctcctcccaactgcggggtcccagaaatcctcgggtcccagtggctgacttacaatattcaattcactctgaccaaacttcctatgagaaaatccacggtgagccaaaatgaaaagtacaaggcagtagtacaggaacctggcagccgcactggccgcccagaaacgtcagtggtgctgccccattcggcgaaaggttagggagcaggaaaagaggaagcaggagaggggaggaaagtcccatggaatatgtattccagaatccttacattttctcagccaccgctccccacgtgagttcccac

SEQ ID NO: 216 - DNA, 420 bp, Homo sapiens
aaatatgacattgaataaataaaaataatctgtcagtatgaaacatccccacagggtacattcatcaaagaggaatttgtcacccaaggccatgtgcttttcagtggaaaggaaggagggaaacctctaaggccgcacggtgggcccacggagctagcacgtgggcgggactgaaggctggatgccgggattgaggtggggaactagagatgactctaaggcaggaacatctgtaccatctgcagggaaatgctacctccccgggtgccagagctccaaccccacacactatgtctactctggagagccggcaaggcagagctggactggctgggtcagggtggaagtgccccaagtcagggacaaggaggacgatggggacgatggggaggagagacaagtaaactagcagtgcttttt

SEQ ID NO: 217 - DNA, 498 bp, Homo sapiens
caaacataaagacctaatgactctcattgcagcagtattcctcttgtattgttattttcttaacttcggatttcctccatttctgcactttttgccatctggaatttcatttgcaagggcagataaggggaaaagaatgtaataagagacgaggaaaaatataagcccttgctgaatgattgatatgaatgaaggaactgatggaataaataacaaaaataaaaagatccaggactactctcagtctctgaagcaggtgggagccctggcggtagctatgggtccagttcaaaggattatgaaatgcactgctttcacatcaaaaaggaagaagaaaggcaatacttgcaaccaatgataaagaggtattctgactttcatctgcctttgtgttaagcgtgagagagccagacagaattgcagcaggaaccagaaggagcaaagaaaaagattactgtttcttttataaaatggtttttatcctactggtgtctcttt

SEQ ID NO: 218 - DNA, 223 bp, Homo sapiens
ctcaacagaggatgtagccagcaactgtgtccccgctcagtctttgagcgagcccattttgtggattgtgtcctatgcgctcatgagcgtctgtggagccatcctccttgtcttaatcgtcctgctgctgctgccgttccggtgtcagcgtcgcccccgtgaccctgaggtcgtcaatgatgagtcctctctggtcagacatcgctggaaatgaatagccagg

SEQ ID NO: 219 - DNA, 471 bp, Homo sapiens
cgccaatcttcgctctgaggtgctgtctcaccggtgagacctggaagcgggcgagtctcgtgctgtgtcggacctgcagcccctggccttccgccaccatggagtacctcatcggtatccaaggccccgactatgttcttgtcgcctccgaccgggtggccgccagcaatattgtccagatgaaggacgatcatgacaagatgtttaagatgagtgaaaagatattactcctgtgtgttggagaggctggagacactgtacagtttgcagaatatattcagaaaaacgtgcaactttataagatgcgaaatggatatgaattgtctcccacggcagcagctaacttcacacgccgaaacctggctgactgtcttcggagtcggaccccatatcatgtgaacctcctcctggctggctatgatgagcatgaagggccagcgctgtattacatggactacctggcagccttgg

SEQ ID NO: 220 - DNA, 374 bp, Homo sapiens
aaaataggattaggaaccagagaccgagataatgagagctcctaaagacagatggaattaatcaattacaattttcctcttgattccatttcatccatataaacagaaatttctccacaaaaaaatctgtgaaatgaatgactgagagttgtgactcctagagtttttgccccttcacaaaataagactttttaaggctcacaaaaggtacctcaatgcttattgtgagatttcatttgctaggagagtttattcaagttcatctaaaattccctgagaaaaaaatgcactatttaaggtagattatgtctcaaggtgcaaaccctgatttgatagagaggcactagctaccagcttccaagtttccatccttt

SEQ ID NO: 221 - DNA, 231 bp, Homo sapiens
aaaacatatataaaaagtggttagggactaacatttgtatcaacagttgataaatgtctaagattgtttattatacagcagggtacaatggtagtgctaatgccaacagggcaccatggaagttagtctaaaaattatcgctaggctttatacaagcaacaacatatgctgctgctcttagaattttgggaaatgatctgcttctaatactaagcagttctttaacatttt

SEQ ID NO: 222 - DNA, 294 bp, Homo sapiens
aaaatccctcaaaaactgtttattatacaagtgagttttgagtcacgatgggcttatcggtaggatttctggtagcgagcgcgggcaccagggcctccaaactttttggactcgcagcgacgagggtcagctaccagcagggtccggtcatactggatgaggatgtctttgatctccttcttggaagcctcatccacatatttctggtaataggccaccagggctttggagatggactgacggatagcataaatctgggccacgtgaccaccaccctttacacggacacggatg

SEQ ID NO: 223 - DNA, 578 bp, Homo sapiens
aaaataacaaaggatacatttaagccaaattttcttaacccagagattttttttttttttttttgtaacatttgcttacacagtaaggtgctaatagaagttagcccttaagccctggaaatcttaggaatcatagtcacacagcaaatataatttcattgtgaaagtgaactttggtagaagaaaaatctataggacacctgaggtagtagaaactggaataaacagtagtagacgttatttacaacttgagtaccaaataacattaagaacacaaaaataattacacgatacaatttccagtccagctttgatccaaagaaaataagaatattacatcacatttgcattgaaaacaaaacaaaaaacaaaacaccacaattaccagcaagctgagggaactgcaaacaaactcaaacacaatggattttgaaatctacagatagtttgagtttgaaatgtggtgggcatggtgatctacaaagtaatactgattagctgaggttcctcagtttatacagtttacatttttgtcagacacagtattcatctgaccaatgatcttccagtacataaaa

SEQ ID NO: 224 - DNA, 554 bp, Homo sapiens
aaaggaaacaaaagtgaataccatattgtttttactgtcatagtgttgctttcttgcctgtcctgcttagtttttacttgctggatgataccataatgtatcaaggagcgtccatggatacaagataagatgtgtaccttagtagaatacagagctttggtaattacatgaataaaattaagaaaatagccatatacaatcaaatacactatggcatttttatttgaatatgatgagtatattttgcttcggaaataatataggaaggaaatgtaaaatagtgagtagtatggtatcagttaattccagtctgagcttctctgtcaacttcagtttctctctcagtttaatgatttaataatagtccaggtttttgtgtgtttttctttatactgcaaattaataatgattcactttatagtttgggagacagaatcaggtcttgaataaaataattgtaatgagtgctaaatgggcaccattattcgaatcagataccttttatattctctttccataaatacgttgatttctgtcaataaaatttttgtgtc

SEQ ID NO: 225 - DNA, 346 bp, Homo sapiens
  misc_feature 16: n = A,T,C or G
aaactgcataatttantaaaattggtacaatttcttttcacatattaatcaacattagaggactgtaaatgcctccctagtaatacagaaatatccattggaaataaaaatagcaccagtgggaaagtatgaaaaaaataagacaaatcagcacatgaggaaatatagtttcattccaataataccattttacagtaattactgaaaaaaatggtaaaaattgtaaaacagtacatcacaaaactaataaaacatattccaaaatgttaatacttgttccaatgaggttggttacttttttatattcatcatcagattttatgtatttttatgtatttttgtattt

SEQ ID NO: 226 - DNA, 305 bp, Homo sapiens
ctgccccattcttttaacgttgtagggcctgcccatggagcggaccctcctctttgggcctcgtgagcttttttgcttatcatgttccatttcgtgccgctttcccccttcaagatgccatttggagggtaggggatctgcttcccactgtgactgggctatgggattctgactaccttgcttacagattcatggtttgataaatttgttgtattcaaaaacttgaaatgcaggacgccattaagtgtctgtttatatttttggaatatttgtattacttacaattaattaataaaagtgggttt

SEQ ID NO: 227 - DNA, 424 bp, Homo sapiens
  misc_feature 33, 78, 109, 139, 185, 210, 364: n = A,T,C or G
ttttttttttttttttttttttttgcattcaanataaaagatttattcacaccacaaaaagataatcacaacaaaatntacactaacttaaaaaacaaaagattatagngacataaaatgttatattctctttttaagngggtaaaagtattttgtttgcttctacataaatttctattcatganagaataacaaatattaaaatacagngatagtttgcatttcttctatagaatgaacatagacataaccctgaagcttttagtttacagggagtttccatgaagccacaaactaaactaattatcaaacacattagttatttccagactcaaatagatacacattcaaccaataaactganaaagaagcatttcatgttctctttcattttgctataaagcattttttcttttgactaaat

SEQ ID NO: 228 - DNA, 569 bp, Homo sapiens
  misc_feature 566: n = A,T,C or G
aaaggatgcactcttgccattttatgtactggaagatcattggtcagatgaatactgtgtctgacaaaaatgtaaactgtataaactgaggaacctcagctaatcagtattactttgtagatcaccatgcccaccacatttcaaactcaaactatctgtagatttcaaaatccattgtgtttgagtttgtttgcagttccctcagcttgctggtaattgtggtgttttgttttttgttttgttttcaatgcaaatgtgatgtaatattcttattttctttggatcaaagctggactggaaattgtatcgtgtaattatttttgtgttcttaatgttatttggtactcaagttgtaaataacgtctactactgtttattccagtttctactacctcaggtgtcctatagatttttcttctaccaaagttcactttcacaatgaaattatatttgctgtgtgactatgattcctaagatttccagggcttaagggctaacttctattagcaccttactgtgtaagcaaatgttacaaaaaaaaaaaaaaaaaaaatctctgggttaanaaa

SEQ ID NO: 229 - DNA, 119 bp, Homo sapiens
gccagagattggagtactttctctggagtgagagaggggcctccacagtttttttttttttttttttttttttttttcttttttttttttttttttttttttttttttttttttttttt

SEQ ID NO: 230 - DNA, 422 bp, Homo sapiens
ctgccaaggatgtgcacaggctccgaggccagagctgtaaggaacccccagaagttcagtctttcagggagaagatggcatttttcacccggcctcggatgaatatcccagctctctctgcagatgacgtctaatcgccagaaaagtatttcctttgttccactgaccaggctgtgaacattgactgtggctaaagttatttatgtggtgttatatgaaggtactgagtcacaagtcctctagtgctcttgttggtttgaagatgaaccgactttttagtttgggtcctactgttgttattaaaaacagaacaaaaacaaaacacacacacacacaaaaacagaaacaaaaaaaaccagcattaaaataataagattgtatagtttgtatatttaggagtgtatttttgggaaagaaaattt

SEQ ID NO: 231 - DNA, 106 bp, Homo sapiens
ctttagtcaggaaggacgttggtgttgaggttagcatacgtatcaaggacagtaactaccatggctcccgaagttttgccaaaacctcggatgcgtggccttctgg

SEQ ID NO: 232 - DNA, 394 bp, Homo sapiens
aaagagaaaaaatttttattgtgatataaaatgcacttataaaatgtccaccagaaggcatgtaattcttcactgctatataaatttactgggaatatgttattcaccatctaggtatgatactgccaactaaaacatactgtaaacgatgagttatactctataacaaatgcatcactgattttcagcaatcattggtttaataataattagtttaagactataatcacatctatattctggaatgtccatttactttaatgtagtgtagtggaatttagagtataattgcacatagatggtacagaaaaacattcacttctaaattattttataccttcatgacaggtagtcttcctgactgaaaataacagcttcagctatggtctgctcc

SEQ ID NO: 233 - DNA, 221 bp, Homo sapiens
gttgagacttaatccctaatgtggcaatactgaaaggtggggcctttgagatgtgattggatcgtaaggctgtgccttcattcatgggttaatggattaatgggttatcacaggaatgggactggtggctttataagaagaggaaaagagaactgagctagcatgcccagcccacagagagcctccactagagtgatgctaagtggaaatgtgaggtgcag

SEQ ID NO: 234 - DNA, 311 bp, Homo sapiens
ttccagaagtgggcggctgtggtggtgccttctggacaggagcagagatacacctgccatgtgcagcatgagggtttgcccaagcccctcaccctgagatgggagccgtcttcccagcccaccatccccatcgtgggcatcattgctggcctggttctctttggagctgtgatcactggagctgtggtcgctgctgtgatgtggaggaggaagagctcagatagaaaaggagggagctactctcaggctgcaagcagtgacagtgcccagggctctgatgtgtctctcacagcttgtaaagtgtgagacag

SEQ ID NO: 235 - DNA, 302 bp, Homo sapiens
aaaaagcttacattagatgatacattcatccttcactttgagaaaatatgctacatgattattcagaaaccaaataatgagaaagtccaaacgaccagattccaacgttgctatgcaggtctccacaaatactaaaaacacagcagtttggaatgtatctattaccagttcagatctgctcctccccactaatatgacttcagacaagtctctttctttctggtttcatttttcttacctacgaatagtaaggaaactgagcacaagttctaaacagttacacaaatggctaacgacaattt

SEQ ID NO: 236 - DNA, 305 bp, Homo sapiens
aaagagattctgttattagcaccatgaactcgtactatgaaatttttaagccttttatttttctaactatattactgtaggactggatattaggtgtcatataggaaacacaaaagtttattgctgtttgctaaagcaaaatagcagaaaattttgtatatgcaaaactgttgaaggaccatagagaaatgtgtactactgacggggcttttactaggcttcctgcgtgtgtaaaagtcgaggtattgctggcattcagggtgacatgatggtactaaatgttttccattaaagtcttctatttt

SEQ ID NO: 237 - DNA, 561 bp, Homo sapiens
aaattgttaagtagaatatgaaaccgaatttgtagctagtaccagagaatggacttaactgtttggtgtttaatgagaacagcttctacacaggatcccaagagacttacagaaaaggggcaaagccctaatattaagcaaataaaactcatgtttcaaacagattatacaaaaattgatttatacttcatttcccttttttgatatttagaaagtgcagatttaacaaaaggtagccatatcctttctatgtacaatgccgattataattatgcaaaactgtcagtctgttatccaaaaatcccagtgtttagctctccaaccttaagtcatggaattgaataagaattaaagagggttaaaataaaaaagctaatgccacattccagataaagggaagcaacaaatacattaatctaacaacagtaggtttaacctaaacttttcaaaaagcttaacatcatttcattatatttttagtggaaaattagggattatttggcaatgctgctttttactagtagtaaacaatgataaagtcaagtgtgggaataacctaag

SEQ ID NO: 238 - DNA, 501 bp, Homo sapiens
  misc_feature 24, 37, 104: n = A,T,C or G
aaagtttgagaaaatacaaaattntcatagtctccangtatttctcctaagatctttccccctatgagggggaaagatagtaactttacaatggagaaacccancagaaacctgaaccaaatgaacaagttcaacatcatcagtaagaagaactatcaatgccataactctgatggaatgcgctgggaaggattccacatcatttttgtgctgtaattgccaaaagttcgtaacttcagtccaatcatggaaatacatcagacaatcccaaatcgaggaacatttcacaaatactgatcagtactggttcaagatgtcacggttatgaaagataaggaaagattgaggaactgttattgcagtcctacaaaacggcgagagactaagaaataactaaatgcagcgtgatcctgggtggaatttgggaacagaaaaaggacattagtggaaaaagtggtgaaactccaataaggtcttttgtttagcgaatatgttcatttt

SEQ ID NO: 239 - DNA, 580 bp, Homo sapiens
cctggaatcattgaaaagtttggggatgacagtgacttggtacaactgagagaactgcccctcaaaagattagaaggacaattgattggcaagagacacttgacagagccagtattgagttccatttattttggagcagtatgcatctgctgggtttgggtactctggaaaaatccaaaacataatataatggaaaaagcatgggtaaaaatcacttattagcaagttgtttaatctttgagcctcttcgttcatctataaatttagaatatgaatatcaactttgaagtgttgctgtgaaaattaaataaaaccatatatggcggaataggtgcccaaaattggttaatcatgaaaaatttaccatcatcaagatgtaaaataattagctgttgttgttggggcagggcttggagttgggggttggatattaagattccaaacctgtataatcttttatctggaaaacctaccagataaaacaaagagattaccacccccatgtttttagggagagagacagaaagtatgacacacaaaagaattaatttgttcaactttgatggaaggtaaacccctt

SEQ ID NO: 240 - DNA, 123 bp, Homo sapiens
cttttatctagaggcgtgttgccatttttgtcttatatgaaatttctgtcccaagaaaggcaggattacatcttttttttttttttttttttttttttttttttttctttttttttttttttt

SEQ ID NO: 241 - DNA, 616 bp, Homo sapiens
aaaaatcatgctactggatttctagctcttcctctatgaccagttctacactgatctgcaatgtttctgaagcttgcctctcttgttctctcatcttggccttttttttgatgtgctttagcaaaggttggactgagtggggacctggctgagaaagtgcaccaaatgagtactttttcagaggtgggcgatggaactgccggagtttgatgggccccatgtgggtgggaaagaagggctgccgtaattccacagcaggaattgaatgctggataatattccctccaaaggtgcctcgaagaccctgttgcttgggataataatactcatcattggagagattccatggatctttcacttctggctgagacatgttctgctgtggttcctccttgatgactcctgttttccctaagagaattcgactcttcttcagagatgattccttcttactctccttggagggggagttagaggtggcctcttccttctcaccaggaatttccaaaatgaggttctcatcattgggatcaagtgtcaaaacaggaggttccaacagccggggcatggcctgagcatcccaaatgatattgtcctcccagcgtccatataccag

SEQ ID NO: 242 - DNA, 488 bp, Homo sapiens
  misc_feature 430: n = A,T,C or G
aaagaaacattcaaaagtggaaattatgccctgcttatcacttagcttttaatttggcaccactctgccaaattaggaatctgttttttactgaacatcaacactcaaatactttttctgccattcaaagtctaatttattctattattttattatttttcaaaagttcattaggcaaaagggagatgtacttgtccaaacacacaaaatatgggccgaatatattaacaagtagattatcaattcactattttgttgaaatgaatgcataactgtataatgtgacttttaactttgattttttatgtagaaaaattatggatcacatggcagtggatcacctaagcaaaaacagcttatggaatcagaataattaagttcacaaacaggtacgcttataataaatggtctcctgttacagttgcaaatnatggttgtatcatctttataaactttgcatttttttctagaaaaatgtctaaggattt

SEQ ID NO: 243 - DNA, 373 bp, Homo sapiens
aaaggcgctcaatagaaattcaaatctcactttaagaccatgaatttcaagttgcaatgaagtgtacaataaagttgtgatttctcaacatcaaagtttaattattacaaaatagttcaagcaacagatagaatttcaaaaactgtatttgctttgcttccttgttttgctccaacactaatcatgctgaggtttttgaagcacagctatgactagggcaggcactgctgattcagtcacaaaaacccttcttggatgaacaatacttgttcttttcagaagaaaagcaattttaccttttctatttctattatgaaaaacagagctaaacaatttttgtatttttagtagagacagggtttcaccacgttgg

SEQ ID NO: 244 - DNA, 115 bp, Homo sapiens
ctattttgtaataattaaactttgatgttgagaaatcacaactttattgtacacttcattgcaacttgaaattcatggtcttaaagtgagatttgaatttctattgagcgccttt

SEQ ID NO: 245 - DNA, 511 bp, Homo sapiens
aaacctgaataaacatgtttgttttcagtgctcactcaaaccactaaaacagatggatagctttgaggttttagataaggaaagattatggagaatgtagttgttattgatttttggcaattttacatttggaattttatcactgtgcttttttatatgaggcactgtagtattttcacatagtatagtactctggatgcaaaagctcaaaaattgtgattccttgaacgttcactaaatcttcaagcaaaaacacatttttacattatttttacgttgattattttagtgaaagaccatatgaagaagcattttaatattaacttgttacatactttgatccactttacatcatttttatgttgttgaggtagggaaattagggttcagtttatcactggacattcaggaggcaagtcaatcttttttatttccttataaaattaactcttcaaaagccgttaaacagagagttatcttaatttttattgcagtaggaggaaatatattt

SEQ ID NO: 246 - DNA, 517 bp, Homo sapiens
  misc_feature 268, 370, 450, 469, 472, 479: n = A,T,C or G
ctgctcttcatttattttgaaagcaaattcatttgaaagtgcataaatggtcatcataagtcaaacgtatcaattagaccttcaacctaggaaacaaaattttttttttctatttaataatacaccacactgaaattatttgccaatgaatcccaaagatttggtacaaatagtacaattcgtatttgctttcctctttcctttcttcagacaaacaccaaataaaatgcaggtgaaagagatgaaccacgactagaggctgacttanaaatttatgctgactcgatctaaaaaaaattatgttggttaatgttaaactatctaaaatagagcattttgggaatgcttttcaaagaaggtcaagtaacantcatacagctagaaaagtccctgaaaaaaagaattgttaagaagtataataaccttttcaaaacccacagtgcagcttanttttcctttatttatttgnggncatgaanactatccccatttctccataaaatcctccctccatact

SEQ ID NO: 247 - DNA, 377 bp, Homo sapiens
  misc_feature 8, 27, 30, 63, 66, 268: n = A,T,C or G
agcttcanactgttttattggtggtanctncttgctgaggtcttttagttggtaataactccnganaagcagcctgtgtatattcctaacactttgttcactagcatttaagtttagaataagcccaagtaagacaatggaaatgtatatagaactcttagttcttacatgatttaattatatcgatacatgaatttaacttactttaatgtaggcaaactatcaattttttgtccattttcctgtttgttaaaataacatacctctnctacgtattattttcttgacccaaatgaaatattaacctaaggtcaagctgggagagagaaatgactgagatgaatgtctttactaaagtaccaataaatttgtcaaat

SEQ ID NO: 248 - DNA, 427 bp, Homo sapiens
  misc_feature 16, 17, 20, 27, 100, 102: n = A,T,C or G
tacattactatactgnnaanctgaaantataaaaaatgtacatatacattttgagttatgtatcctttttttaaaaaaaagttcgagtctgttgcactangntgtacatgactaaagttgacagatgctatgctagatttataatcactagttctggtacttgtgtctttgtatgatcaaagcatgcaataagcaatacaaaataccaagccttatacttaaaagaagtttaacatattggttaatatactggttaatatactggttaaacatattgaatgtatataagtggcaaaactagatttttaaggaagtgtacattataatattggagctcagtactgcatgaagagacttcattaaaactaagaaaacatttatttggggagaaattttaggcatttaagaacttgtatttttctatttt

SEQ ID NO: 249 - DNA, 328 bp, Homo sapiens
  misc_feature 144, 162: n = A,T,C or G
ccatataggctgtgctccaaaccactccatgaaacctgccactcaatttttagaaacataattgtacaggaagatttaattttcctgtctcagaatttggcagatgtattagggtttttttttttttaactaagggcagagcanacctaaatgaggcaatgnataagtatgtatacacaatccatctcaatgtacattttgtctgtccatgtatacaaataaaactttgtgttatacaaatacagaagatattttctgaggtctgtggagcatttacaaaaataatgatgttattttcatacttggagacaaagaaaatcttcatttt

SEQ ID NO: 250 - DNA, 343 bp, Homo sapiens
aaattaaatatttgaatataaaatagctctaagaaagaagcaaattatcactgaacatatttcttattatttctggctttgaattatacgtaacttaaattgtcttaaatgatacagaatattggagaatatgatactttcacataatatactatgaacctgttcatataactctgattgactactaacttctgttttatgtatttattaaagagctgacactgtagtttgtggtgagatgtttatttttctaacagagcttataacagttaggacaaggcatttaattaatgcatcattctgtttagtagtaggtgttaatcaatatgaaattctctgtttg

SEQ ID NO: 251 - DNA, 403 bp, Homo sapiens
aaactcagatgtatatttagcatgctaaaaagtgaaaaaaatttcaactgaagttctgtggctcatcagttcaaatgtttcatggcattttttttctttaagtgaaaaattttgatactgtaaaacagttttacataataaatgcaaaaagataacattttctaaatttttagaaagaatattcacattcattttgtcatgggtttcacgtggctcttctaaatatattaatcatattaataagacactggtcctatacaatttcaacagtccatcttcaattaaaaactaacaaaaataaacagtatgtaaagagtaacaaaaagtaaattaaatatactaaactcacacaacaggtagaataaaatgaaaccaaattacataatggcaggttatacatttt

SEQ ID NO: 252 - DNA, 582 bp, Homo sapiens
  misc_feature 26, 522, 577, 578: n = A,T,C or G
cagtgagggaggactgtacttttcantaccatacagaagggagagcctgttctaaagctgacgtgggtctcaatagtacatgagaagcacaattcccaaatgatctgggatctcctgtttataaatatattaccaaattcaagtgtgggttcttcttctatttccactgtaagattgagggtgttgaaaaaacagtagtccttgagcaaatctgtgaggaatcttgtcagaatgtgatctttcctgggactagtttagttgtgagaactacatctgcttgttctgggaataagggtctccccaggtcctgccctcaggtggccctggctgcaggacaggatttcaggtatcagaaactggtgtgtgagccaagcaaatagttatccatttataaaaaggatggtttgcagtgtgttataataattttatatctagcagggacaatgaaaaatggttatgtctacattattaaatgaatgaaactaatgctaaacagttaattttgcatttttatttttctgngtttctaccaagtcagatcttaaaaatgggcagtatatgaagagctttagtttgnnggag

SEQ ID NO: 253 - DNA, 497 bp, Homo sapiens
  misc_feature 54: n = A,T,C or G
atattgattaacacctactactaaacagaatgatgcattaattaaatgccttgncctaactgttataagctctgttagaaaaataaacatctcaccacaaactacagtgtcagctctttaataaatacataaaacagaagttagtagtcaatcagagttatatgaacaggttcatagtatattatgtgaaagtatcatattctccaatattctgtatcatttaagacaatttaagttacgtaaatagacttcaaagatcctatcaagtttttatttggttattgttgctttaagtccttaatgcttttctttatttattggactaagccaattttagaaacaaaatccacaaccaacacacatataatgcagatgtttctgaaaaaactaaatagtgttatctttagtatatcattaaaatagtggttgtggttaaacaaacaagcaaacaaattactgcaactcatttatgataagcttacaaaaagtaacatttt

SEQ ID NO: 254 - DNA, 250 bp, Homo sapiens
aaatactctagaatctgaaaatattaaatattaaatagatggagggatcaaattatcaagttttttaacaaaattgaggtaaaaatctgcattaaattacaccaagaaaaacatttctaaaacattgtttccataactcattataaatatttcatcttccgaaagtactctttgattacctctggccttctgggtctggtaattaagttgacttaatatttgcacatagctactgattactcaatacagg

SEQ ID NO: 255 - DNA, 453 bp, Homo sapiens
ctggcttcactgctcaggtgattatcctgaaccatccaggccaaataagcgccggctatgcccctgtattggattgccacacggctcacattgcatgcaagtttgctgagctgaaggaaaagattgatcgccgttctggtaaaaagctggaagatggccctaaattcttgaagtctggtgatgctgccattgttgatatggttcctggcaagcccatgtgtgttgagagcttctcagactatccacctttgggtcgctttgctgttcgtgatatgggacagacagttgcggtgggtgtcatcaaagcagtggacaagaaggctgctggagctggcaaggtcaccaagtctgcccagaaagctcagaaggctaatgaatattatccctaatacctgccaccccactcttaatcagtggtggaagaacggtctcagaactgtttgtttcaattgg

SEQ ID NO: 256 - DNA, 239 bp, Homo sapiens
  misc_feature 169, 191: n = A,T,C or G
aaacaaaataagatgctctcagagcttttttttttttttttttctccctggaaaggaagtttcattatgttgcccaggcaggtctcaaactcctggcctcaaatgatcctcccacctcagcctcccaaggtgctgggattacaggtgtgagccaccacgcccggcccanagaacttttttttttactgcanaaaacatttttataactttagaacttttctaaaatactactttgtcag

SEQ ID NO: 257 - DNA, 513 bp, Homo sapiens
  misc_feature 470: n = A,T,C or G
aaaggctatatttttcagcatgtaggtagctacactgtaatcctgttgaagaaactttcctatttaagcttataggatgaaaatatataattaaagtcttctgatcatagcttgagaccatcaagggaatgtttagtttcctccacaaagagccaccaggattttctcataatctcctttggtttcatcctgttgattcaaaaaaaggtatacttaatgttagtcgaaaccataattctctatttttttttacttatagaagaattatttttagacttagctgtagatgagattacacattaccattcacttaattaaacaatatatacaacagataactgattttttatcattgcataaaaaagcaatagccttcaagactgagattacaaacttttctgaattaattatgttttatattagtgccattattttctatgaatgaaatatcacacaaaattaaataagtntaacacaatataatctcatatcttatgtgaggagatacctgat

SEQ ID NO: 258 - DNA, 416 bp, Homo sapiens
aaaatagtttaattttttatataaaaggttttgtatataatgtgtgtcagtgactattttcaaaatcattttcatcaagacaccttttttctaaaataggcattgcatacacatatgcacacgtatgtgcatgtgccacacattttttgtataatgttgggtttgattataaaagtgttgtcaaatgttttatttatctgcatatagcagtggttggcttttttgaattgaaatttttgcgcattgatgcattgaaataaggaaaattatttatctctgagcactaaacttatttttgcatatttctgtaatattgcagtccccagatccagaacatgggaagttagggaaaatgtgtgattttgtgttttgaattactgtcagaattacatacacaattacaacaaacttttttt

SEQ ID NO: 259 - DNA, 446 bp, Homo sapiens
  misc_feature 292, 295, 311, 352, 365, 374, 389, 393, 396, 400, 438: n = A,T,C or G
aaaataagctgttttaagaggaacagaagggaaatctgctacctagtctatacacagcatgaacctcacagggggcttctgataccctcaaacatggagaacagtaagggagcagagtggttaaggactttcaggaacttaactattctggaataaggaatgaatcaactgaccttgggccagcaggtttttaactaaattgttacttgcctttctcacccagttaatcagtctctgtacttgtttccctttttgaaacaagtgtcttggttaactaattctgttttatggntgngctaaattcatagcangtgccttattctttgcttttagtcaaaccattccatatcanaattttccttggnttactatanatatttggctttaanttgntgnttgngttttttaatgtacaatgttctgataaatttgacttgntaaattgc

SEQ ID NO: 260 - DNA, 263 bp, Homo sapiens
ggtcttctataaaagaagaggtgcttctgatctgtccagtgaagagggttggagactgttcaagatcgacaaggagtacttgctaaaaatggcaacagaggagtgaggagtgctgctgtagatgacaacctccattctattttagaataaattcccaacttctcttgctttctatgctgtttgtagtgaaataatagaatgagcacccattccaaagctttattaccagtggcgttgttgcatgtttgaaatgaggtctgttt

SEQ ID NO: 261 - DNA, 322 bp, Homo sapiens
  misc_feature 182, 211, 213, 228, 252, 270, 284: n = A,T,C or G
ctgtagcttctgtgggacttccactactcaggcgtcaggctcagatagctgctggccgcgtacttgttgttgccttgtttggagggtgtggtggtctccactcccgccctgacggggctgctatctgccttccaggccactgtcacggctcccgggtagaagtcacttatgagacacaccantgtggccttgttggcttgaagctcctcanangagggcgggaacagngtgaccgagggggcagccttgggntgacctaagacggtcagnttggtccccccgcngaacacccaatgattaccactactgtctgttgagtaac

SEQ ID NO: 262 - DNA, 357 bp, Homo sapiens
gaaactaatctggattcactccctctggttgatacccactcaaaaaggacacttctgattaagacggttgaaactagagatggacaggttatcaacgaaacttctcagcatcacgatgaccttgaataaaaattgcacacactcagtgcagcaatatattaccagcaagaataaaaaagaaatccatatcttaaagaaacagctttcaagtgcctttctgcagtttttcaggagcgcaagatagatttggaataggaataagctctagttcttaacaaccgacactcctacaagatttagaaaaaagtttacaacataatctagtttacagaaaaatcttgtgctagaatacttttt

SEQ ID NO: 263 - DNA, 266 bp, Homo sapiens
ctgcagcttttcaccacattttcaattactgaattgcatgttttttttccaccttgataacttagggtcagtagaaagctatttacttacatgttatagtcaatataactatactaaatgcccatttgtaactgaagaaactcacagacacagtatgaactatattatacaaaatcatgaccatgagtttcagtgagagattctgtctctctcttaaagcaagaaatatcccacagctcagatttacataagtagtgccgcctttt

SEQ ID NO: 264 - DNA, 410 bp, Homo sapiens
taaagctgttggagaagagggactcatataaatagttggattgcgttttgctttttatttctttataaaaatatgtcaaaaacagtttttaattttagaaatcttatacttgaaagaaacctcaattatcagtggctttatgaagtaaagttaaaaacaaacataggaaatgtgaaaatatttgtgtttgttttgtctgactaacttgctgctaaatgctatctttaggtgtgtgaaagttctttgatatgttattgtccttttacatcttgttaaatagccattgcttttgagaatcagatagtgtgttgtttaggggttaattgtgtctatatctttcaaaaacttttatattatgtattataagaagttacagtagtaccattttgattagtctgaatgttttcagg

SEQ ID NO: 265 - DNA, 505 bp, Homo sapiens
gaagaggaaaggaactgatgttcccaagtggatcagcatcatgaccgagcggagcgtgccccacctccagaaagtatttgataggtacaagagttacagcccttatgacatgttggaaagcatcaggaaagaggttaaaggagacctggaaaatgctttcctgaacctggttcagtgcattcagaacaagcccctgtattttgctgatcggctgtatgactccatgaagggcaaggggacgcgagataaggtcctgatcagaatcatggtctcccgcagtgaagtggacatgttgaaaattaggtctgaattcaagagaaagtacggcaagtccctgtactattatatccagcaagacactaagggcgactaccagaaagcgctgctgtacctgtgtggtggagatgactgaagcccgacacggcctgagcgtccagaaatggtgctcaccatgcttccagctaacaggtctagaaaaccagcttgcgaataacagtccccgtgg

SEQ ID NO: 266 - DNA, 244 bp, Homo sapiens
gcaaaaccccactctgcatcaactgaacgcaaatcagccactttaattaagctaagcccttactagaccaatgggacttaaacccacaaacacttagttaacagctaagcaccctaatcaactggcttcaatctacttctcccgccgccgggaaaaaaggcgggagaagccccggcaggtttgaagctgcttcttcgaatttgcaattcaatatgaaaatcacctcggagctggtaaaaagagg

SEQ ID NO: 267 - DNA, 419 bp, Homo sapiens
ctgcaccgtagcaccttcactatccccagtcactggaatcaccactgaagctcgcgtttgtttcttctcaaacacctgagaaaacccgatgatagtgctgtgttggataagagccatgtatctgtttcccaggggagtggttgtgaagttcacttctactgtctcctcattcttcttacaagcagtgatgttcggatcccacaggcttccggccttgacacacttttttttatatttcattatgtggtctaggcagcctggtgaggtgaaattcacagacatggaagggccatcttcattcatatttgcattaggaatattatgggccccaatgaaatagactgtgttcagctctacagggaagccgatgtaggaaaatgtccatttaccaccagagggtctggtctgagtctggaagg

SEQ ID NO: 268 - DNA, 615 bp, Homo sapiens
  misc_feature 539, 579, 594: n = A,T,C or G
ctggttttgtaaaatcagtctctttattctactgtgctgaaaccctcaccaatatagaaaattagattctcattgcactgaactatatttatatgcctaagtatgtagaagtaaaattatataccccaaaaggattttatcttgttgtatatattaaatgttatttctgcatatagggtcttttatggagaaactgatgatgataagcttaatactcacttgtttagcagcatctgaatgcacaaatgctttatatatctcttctgctttacagggcaaaagatcagactctgttttcttatagtcttcacaagccagccagaactcaatattctcctcactgaattcagactttaggaaacttccaaagacattttgaccagctaaaaagaaacgaggggtgggtggggagataattaaattaaatgaaccaacaaatgaataatttgaagaagaaatttgtaagaaaaatacaattgcttcctattcatacaaaggtaagagacagctactgctgaaatagctgtgttatagattgnagagatgagaagtcatttgaaatttcttcattcatagaanaggaatctggggccngacaaactcattcatagtcac

SEQ ID NO: 269 - DNA, 410 bp, Homo sapiens
aaaaattttaatgatattcatcgttgtatatgacaatgtcagaaatttcattaggacaacaattaataaaagcgcctatccacggcaaaaatgaaagatgagttttcacagcaggaaattagtgctgaatcagtgactcctgaagtcgttacagcagcgcttgcgagatgttgcattttcctctgctagggcacactgcttgggcggtttaatattgtttttttctcccttagaatttgatgttatcaaagctaccattaacattttacttaaagtttttaggagaaactcttcacaaagttaatagtgcagatcttctagtaattaagatcatttcagatgtgcctgaaatgagtaccacatgtggatgagtttgctttttccattccattaagttcggtagaaatttt

SEQ ID NO: 270 - DNA, 244 bp, Homo sapiens; identical to SEQ ID NO: 266

SEQ ID NO: 271 - DNA, 517 bp, Homo sapiens
  misc_feature 12, 19, 33, 51, 55, 122, 136, 138, 183, 219, 224, 229, 236,255, 300, 318, 325: n = A,T,C or G
cctgctgggctnggcaacnagggactcggcctnggaggcgacccagaccanacanacactgggtcaaggagtaagcagaggataaacaactggaaggagagcaagcacaaagtcatcatggnttcagcgtctgctngnggaaaccaagataaagatgcccattttccaccaccaagcaagcanagcctgttgttttgtccaaaatcaaaactgcacatncacanagcanagatctnaaagattatgcgagaatgncaggaagaaagtttctggaagagagctctgcctttttctcttgtnagcatgcttgtcacccanggactantctaccaaggttatttggcagctaattctagatttggatcattgcccaaagttgcacttgctggtctcttgggatttggccttggaaaggtatcatacataggagtatgccagagtaaattccatttttttgaagatcagctccgtggggctggttttggtccacagcataacaggcactgcctccttacct

SEQ ID NO: 272 - DNA, 215 bp, Homo sapiens
ctgaacaaagatactgtaacattatgatttgagtggtgcttttccttgctttgttaaccatcacgagagtctgcagcacaacttttaacaaagctagaacagttttggcttcttaaacttcatatttgggtaggttaagctgccatacgtgttcagtgtgaatagtgtttaagttgaaaatattgtaaaaaaattatattttttcaaaaatattt

SEQ ID NO: 273 - DNA, 225 bp, Homo sapiens
  misc_feature 59, 86, 102, 108, 112, 115, 162, 168, 209: n = A,T,C or G
atgatgcatcaagttaacgtctaagcaaaagatcagcagagatcagagattgttgggtncacacgtatcttgtgatgtcttctganaaccaacttattcctntttctntganaanaacttgacccctcgccccggggctgagtgcttggcagccacatttgngttganatcttgattcctgctctaactacacagggctgggatggacncctgctccaagtttgg

SEQ ID NO: 274 - DNA, 493 bp, Homo sapiens
  misc_feature 381: n = A,T,C or G
ccatgtccagccaagggtacaatgtgcttgttcccgatcacccaggtttgccattggaagtcaaagacagaatcgcttcatggcactacagatgtggaaaaataaaaatctcagctagaaagaacgtccgatttggagatagcgggaggacacgaaggagtgggggccattttggtgctgagaggagggtgccccaacttcaggaggaccatgtgacggctgtggttgttttcggggtcacttgcagcacacacagcgtccccttgatgctcgatggggaccgcagacgggcctgcagacctaacccctggctgtggacaggagaggctgctccaggcttctttccttctcaatgctttacacaggatttccttcatttgngctttcctttggtttaacagttaaaaaagaagagtgagggggcaaaatggtttgtcacttgtccaaaactgagagaagaggtggaagtgggcgccaaatctcctgggtgatg

SEQ ID NO: 275 - DNA, 429 bp, Homo sapiens
ggaccccagagaggaaaaagtgacttgcccaaggtcgtaagcaagctactggcatggcaagagcccagcttcctgacggagcgcaacatttctccactacactgtgctagcagctcagcagggcctctaacctgtgatgtcacactcaagaggccttggcagctcctagccatagagcttcctttccagaacccttccactgcccaatgtggagacgggttagtggggctttctatggagccatctgctttggggacctagacctcaggtggtctcttggtgttagtgatgctggagaagagaatattactggtttctacttttctataaaggcatttctctatatacatgttttatatacctcattctgacacctgcatatagtgtgggaaattgctctgcatttgacttaattaagaaaaaaaaaag

SEQ ID NO: 276 - DNA, 632 bp, Homo sapiens
aaaataaatatgtactacggaatatctcgaaaaactgcactagagacaaagacgtgatgttaatatcttttccccacaattattacggataaacagtagcaccaataaataaatgataacaaatattaaaattaaaaaaggagagagatttagtatgtagaattctctattttttcttgttttgtttttacatataaaaaacagaatagcaatgtctattttatcagaatcacatatatacataaacatatatatatatatatacacacaaatacaagttgccaaatatatatatagtatgtagatgtatattgaaaccttatttcaaaggaatgtgtgctggggagccaggggatcggggagggcagagctgagtgttagcaaaattaaatatctgttcaagataagctagtgactgtcaccgatcagggagagagagattggaaacatggattttatatacaaaaaccggtacaaataagagagcaagagagagcaaaagatacatctcataaatagttgaaattaaatattaaccaagaatactgaaaaaaaaccctactctttaattaaattaactgttttaatttctaattaaaaagggatattaaataagtaccgtatataaaaca

SEQ ID NO: 277 - DNA, 463 bp, Homo sapiens
  misc_feature 121, 129, 136, 384: n = A,T,C or G
ctgggctggaacgtgaactcagtagctgaacctgtctgacccggtcacgttcttggatcctcagaactctttgctcttgtcggggtgggggtgggaactcacgtggggagcggtggctganaaaatgtnaggattntggaatacatattccatgggactttccttccctctcctgcttcctcttttcctgctccctaacctttcgccgaatggggcagcaccactgacgtttctgggcggccagtgcggctgccaggttcctgtactactgccttgtacttttcattttggctcaccgtggattttctcataggaagtttggtcagagtgaattgaatattgtaagtcagccactgggacccgaggatttctgggaccccgcanttgggaggaggaagtagtccagccttccaggtggcgtgagaggcaatgactcgttacctgccgcccatcaccttggagg

SEQ ID NO: 278 - DNA, 234 bp, Homo sapiens
  misc_feature 114, 121: n = A,T,C or G
ctagagacaaagacgtgatgttaatatcttttccccacaattattacggataaacagtagcaccaataaataaatgataacaaatattaaaattaaaaaaggagagagatttantatgtanaattctctattttttcttgttttgtttttacatataaaaaacagaatagcaatgtctattttatcagaatcacatatatacataaacatatatatatatatatacacacaaat

SEQ ID NO: 279 - DNA, 463 bp, Homo sapiens
  misc_feature 198, 277, 369, 443, 452: n = A,T,C or G
ttcgtacccgttggaatagcgggttttgcagcaattgttgcatatggattatataaactgaagagcaggggaaatactaaaatgtccattcatctgatccacatgcgtgtggcagcccaaggctttgttgtaggagcaatgactgttggtatgggctattccatgtatcgggaattctgggcaaaacctaagccttanaagaagagatgctgtcttggtcttgttggaggagcttgctttagttagatgtcttattattaaagttacctattattgntggaaataaactaatttgtatgggtttagatggtaacatggcattttgaatattggcttcctttcttgcaggcttgatttgcttggtgaccnaattactagtgactagtttactaactaggtcattcaaggaagtcaagttaacttaaacatgtcacctaaatgcncttgatggngttgaaatgtc

SEQ ID NO: 280 - DNA, 529 bp, Homo sapiens
gggatgcagcattatgatgtgggtcaaggaattaagttagggaatggcacagcccaaagaaggaaaaggcagggagcgagggagaagactatattgtacacaccttatatttacgtatgagacgtttatagccgaaatgatcttttcaagttaaattttatgccttttatttcttaaacaaatgtatgattacatcaaggctttaaaaatactcacatggctatgttttagccagtgatgctaaaggttgtattgcatatatacatatatatatatattttaatttgatagtattgtgcatagagccacgtatgtttttgtgtatttgttaatggtttgaatataaacactatatggcagtgtctttccaccttgggtcccagggaagttttgtggaggagctcaggacactaatacaccaggtagaacacaaggtcatttgctaactagcttggaaactggatgaggtcatagcagtgcttgattgcgtggaattgtgctgagttggtgttgacatgtgctttggggc

SEQ ID NO: 281 - DNA, 138 bp, Homo sapiens
aaagcgctgatcctgtttatttggcaggaaaacgagacaatccagcagcccaggagggacaggtggacttaatcctcctcctcgtcgtctccagccccagccccaccctggcccttcttggcattcttcctcttcacg

SEQ ID NO: 282 - DNA, 436 bp, Homo sapiens
  misc_feature 126, 215, 250, 357: n = A,T,C or G
ctgtggtcccagtcagtccggtactgcaccaagtgctccaaacagtggttcaagaatctgttgttccagttcagttctagctgggattcactcagtttgtgaagtgttaggttctctggagcccangggatcaccagattctgcagttttagcatctgtgtggcctgtctcctgggttcccgtgggtcctggagctgaacaacaaatgtttggtngaggtggatctcctttttttgcaactgacagccanaagtgatttcttcagagaatagatagtggctgcacttctggactttatcattatccgagttcttgtaccaataatgcagagtgaggttggtaggctggggctcaaanctgctgttccaagtgcaattcatgtactcgacattgaacacaaaacactgaacctctgggaggggcagagtggaaacac

SEQ ID NO: 283 - DNA, 117 bp, Homo sapiens
ttttgggacagaatggaatctcagaccttgtgaaggtgactctgacttctgaggaagaggcccgtttgaagaagagtgcagatacactttgggggatccaaaaggagctgcaatttt

SEQ ID NO: 284 - DNA, 440 bp, Homo sapiens
ccaataatgagtaatagcacaaagtaaaagtgacttaatttgaaattacttctgtttggctagtttgcttagctgatcaccaccaacatcataggtctataaatcacccaactaagatcaggggtgtttcatgggaaaatctacacaaactattcattaaaaaccatagagccatggactgtcatttctgatttctgtttgattctttgtggtcatcattgaatatacaggggcctctatacactctggggagtatctattctcaggtgagcaaaataccgaatactgaatggaaatcaactgtaagtattaggacttcatatgcaacttgaatttttggtgctgtccggagtctagagccccacaatctgttttggttacagtttatccctgtaggataaatgatccatttaactattcatcagaggtgctgtaatttc

SEQ ID NO: 285 - DNA, 462 bp, Homo sapiens
cctactatgcaggccacgtgctgggggcagccatgttccagattaaagtgggctcagagtctgtggtctacacgggtgattataacatgaccccagaccgacacttaggagctgcctggattgacaagtgccgccccaacctgctcatcacagagtccatgtacgccacgaccatccgtgactccaagcgctgccgggagcgagacttcctgaagaaagtccacgagaccgtggagcgtggtgggaaggtgctgatacctgtgttcgcgctgggccgcgcccaggagctctgcatcctcctggagaccttctgggagcgcatgaacctgaaggtgcccatctacttctccacggggctgaccgagaaggccaaccactacaagctgttcatcccctggaccaaccagaagatccgcaagacttttgtgcagaggaacatgtttgagttcaagcacatcaagg

SEQ ID NO: 286 - DNA, 402 bp, Homo sapiens
aaactcagatgtatatttagcatgctaaaaagtgaaaaaatttcaactgaagttctgtggctcatcagttcaaatgtttcatggcattttttttctttaagtgaaaaattttgatactgtaaaacagttttacataataaatgcaaaaagataacattttctaaatttttagaaagaatattcacattcattttgtcatgggtttcacgtggctcttctaaatatattaatcatattaataagacactggtcctatacaatttcaacagtccatcttcaattaaaaactaacaaaaataaacagtatgtaaagagtaacaaaaagtaaattaaatatactaaactcacacaacaggtagaataaaatgaaaccaaattacataatggcaggttatacatttt

SEQ ID NO: 287 - DNA, 463 bp, Homo sapiens
cctccaaggtgatgggcggcaggtaacgagtcattgcctctcacgccacctggaaggctggactacttcctcctcccaactgcggggtcccagaaatcctcgggtcccagtggctgacttacaatattcaattcactctgaccaaacttcctatgagaaaatccacggtgagccaaaatgaaaagtacaaggcagtagtacaggaacctggcagccgcactggccgcccagaaacgtcagtggtgctgccccattcggcgaaaggttagggagcaggaaaagaggaagcaggagagggaaggaaagtcccatggaatatgtattccagaatccttacattttctcagccaccgctccccacgtgagttcccacccccaccccgacaagagcaaagagttctgaggatccaagaacgtgaccgggtcagacaggttcagctactgagttcacgttccagcccag

SEQ ID NO: 288 - DNA, 261 bp, Homo sapiens
  misc_feature 40, 47, 164: n = A,T,C or G
ttttttttttttttttggtctaaaagtatttaatataaanaacagcnaagcacccttttgtcagaaagaaatccctatgacatatctcagattacactagtcaaatttccctttatctgaatttctttttggatacaaaataataatatcctcatctgtttcanataaatgttcagcattacccaatatggggatcataatgaattcagaaaaaaaatattgcattaaaaaaatagccaattcaaagttttttttagtttt

SEQ ID NO: 289 - DNA, 355 bp, Homo sapiens
cctccacaaagtaccaaaccaggaagaggcagaaggactgctaagtcttcagccaatgacttgcttgcatcagacatctttgctcctcccgtctcagaaccttcaggccaggcgtcacccacaggacaacctacagccctgcagcccaaccctctggatctcttcaaaacaagtgctcctgccccagtggggcccctggtgggtctaggtggtgtaactgtcacactccctcaggcaggaccatggaacacagcatctttggtcttcaatcagtccccttcaatggctccgggagccatgatgggtggtcaaccttcaggttttagtcagcccgtcatttttggtacaagtccag

SEQ ID NO: 290 - DNA, 324 bp, Homo sapiens
cccagtttgaggcagtgctggagtggggaaggccgtcttagaccatagaggttggaagacgctgagagatcatccagcccagccccttgatgttacagagcagaagacagatgcccaaacaggagaaggcacttgcccacggtcatacggcaggttgccacaaaaccaagatggcagcccttcctcagcgtgcctcactgccactcccagagccagggagccccataaaacccacatcatgtcttaagagtatatctggctccttgaccagcaatcggccctgggagccaccaggtgggaaaagcgcctctgccagagtccagg

SEQ ID NO: 291 - DNA, 104 bp, Homo sapiens
tgcattaatatttaatagtgcttgcttttcctctgggcacaccattttgatcattaaccagagtacctctactcttagcaaactctagtttatgacaagtattt

SEQ ID NO: 292 - DNA, 247 bp, Homo sapiens
  misc_feature 42, 147, 158, 165, 178, 195, 223: n = A,T,C or G
tgtacaagctcttttttttttttttttttttttttttatggnaaaaactttatttactatttataaatacattgcaagacaaacttctcaaaaatacttttccccccaaaaagttaaaaaaataaagaaaagctaataggtaggcanaatgtcttganacccctntgttttcaagganagctctatgcagcgtgngtccacaccgaggtctgcagcagggcanagtctccctgagcctgactttgcc

SEQ ID NO: 293 - DNA, 467 bp, Homo sapiens
gaaaataccaccttttccccttgtattacagtacaatgtttacattactatactgtcaagctgaaagtataaaaaatgtacatatacattttgagttatgtatcctttttttaaaaaaaagttcgagtctgttgcactaggctgtacatgactaaagttgacagatgctatgctagatttataatcactagttctggtacttgtgtctttgtatgatcaaagcatgcaataagcaatacaaaataccaagccttatacttaaaagaagtttaacatattggttaatatactggttaatatactggttaaacatattgaatgtatataagtggcaaaactagatttttaaggaagtgtacattataatattggagctcagtactgcatgaagagacttcattaaaactaagaaaacatttatttggggagaaattttaggcatttaagaacttgtatttttctatttt

SEQ ID NO: 294 - DNA, 221 bp, Homo sapiens
  misc_feature 25: n = A,T,C or G
aaagaatagtactattttgaaacanccaatatagtatctgaaaatattccattttatccataatcagtgagtattatttccaaaaaaagtaacttgcattttcttgtgaaaaatatggttttttttttagatgtctgccaagatttatcagaaaagtccatctttctaaacctaaaaaattgtaatgcctttattgagaactttttttacctaatggcttt

SEQ ID NO: 295 - DNA, 229 bp, Homo sapiens
  misc_feature 128, 192, 197: n = A,T,C or G
ctgatggtttggaaatgagagaactacagtggtgaagagaccaggaggcagctctcagtgaaaccaacattgcggatgcccttcgtgagccttctcagtcccagcaggaagcccacaacactagcctncccagcctgcctgctgacaacacctaggcttactttatctaaaatcagagtgtaccaggtctgnagcanaaaataatcaactaaatgtcagggacctatga

SEQ ID NO: 296 - DNA, 472 bp, Homo sapiens
  misc_feature 76, 211: n = A,T,C or G
cgccgagtcgcgcggaggcggaggcttgggtgcgttcaagattcaacttcacccgtaacccaccgccatggccgangaaggcattgctgctggaggtgtaatggacgttaatactgctttacaagaggttctgaagactgccctcatccacgatggcctagcacgtggaattcgcgaagctgccaaagccttagacaagtacgtgtatcantctcaatactgtgggttcttgcaaccggaacaaaactgccacccaagggaagaaggcatggagttcatggtgttagcgcaaaagttctgaatggcatccgtcctaccggaaacctaggaaaaggcgccaagcccatctttgtgtgcttgcatccaactgtgatgagcctatgtatgtcaagttggtggaggccctttgtgctgaacaccaaatcaacctaattaaggttgatgacaacaagaaactaggagaatgggtagg

SEQ ID NO: 297 - DNA, 88 bp, Homo sapiens
tttgccccagaaaggggaaaggaacacgcgggtagatgatttctagcaggcaggaagtcctgtgcggtgtcaccatgagcacctccag

SEQ ID NO: 298 - DNA, 411 bp, Homo sapiens
  misc_feature 236, 285, 310, 329, 341, 373, 396: n = A,T,C or G
ccagtggcagacacaatcataaagttgttggtgcttttcttctttaggtgtttctttttattagcatgaggagaggggggcgggttgagcttggggctggtggtgctggagatactggggctgaagcatatggagtcacccagcccggtgtccatgtccttggataggccattgcttttagagctggagatgggtgtgcaggccgatgtggctagggatggacctgcccgggcggncgcccgggcaggtcctgtccccggacctgcagtctatggagcagattcngcggatcatgcggcccacagatgtncctgaccagggcctgctgngtgacctgctgnggtctgaccctgacaaggacgtgcagggctgnggcgagaacgaccgtggcgtctnttttacctttggagc

SEQ ID NO: 299 - DNA, 477 bp, Homo sapiens
ggcaaagaggcacctcctccaggtgcgaaggtccagctcagtggcacaagtgaaagcaatgatcgagactaagacgggtataatccctgagacccagattgtgacttgcaatggaaagagactggaagatgggaagatgatggcagattacggcatcagaaagggcaacttactcttcctggcatcttattgtattggagggtgaccaccctggggatggggtgttggcaggggtcaaaaagcttatttcttttaatctcttactcaacgaacacatcttctgatgatttcccaaaattaatgagaatgagatgagtagagtaagatttgggtgggatgggtaggatgaagtatattgcccaactctatgtttctttgattctaacacaattaattaagtgacatgatttttactaatgtattactgagactagtaaataaatttttaaggaaaaaaaaaaaaaaaaaaaaaaaagg

SEQ ID NO: 300 - DNA, 382 bp, Homo sapiens
aaaacaccctccaatatagagagaactctgaaaccagaagcagaagctgaggaatggtgaatagagcattttccctcacacgatgggtatcagggtggtttcttgtcctttcaatgcctctgcagaacttgaccctagtttttcaaattggactcaagaatgatcttagtgttggtggttttgtggttttctttgagactttgttattgacagaacagcttctggaaatctgtaatcccagctactccagaggctgaggcaggagatcacttgaacctgggagagggaggttgcagtgagctgagaacacatcattgtactccagcctgggcaacagagcaagactccatctttttcaccgggagtatgggggcttctttgg

SEQ ID NO: 301 - DNA, 169 bp, Homo sapiens
ccatggccgcttccagaccatggaggagaagaaagcattcatgggaccactgaagaaagaccgaattgcaaaggaagaaggagcttaatgccaggaacagattttgcagttggtggggtctcaataaaagttattttccactaaaaaaaaaaaaaaaaaaaaaaaaaaa

SEQ ID NO: 302 - DNA, 463 bp, Homo sapiens; identical to SEQ ID NO: 287

SEQ ID NO: 303 - DNA, 283 bp, Homo sapiens
ttgggctattggattaagtgtggctgatcttattgaatccatgttgaaaaatctatccaggattcatcccgtgtcaacaatggtaaaggggatgtatggcattgagaatgaagtcttcctgagccttccatgtatcctcaatgcccggggattaaccagcgttatcaaccagaagctaaaggatgatgaggttgctcagctcaagaaaagtgcagataccctgtgggacatccagaaggacctaaaagacctgtgactagtgagctctaggctgtagaaattt

SEQ ID NO: 304 - DNA, 540 bp, Homo sapiens
ccatttcaatactatgtggtcgttacaatgctagaggtaggcacagggggcgcaatgcaagggaggaagggcgttaacatctgccacctacttccaggtgccaagcactgttatcaacattattccactttattccctggtgattatgaaaggcaggtattgatattcacacttaacagacgaggaaacagcctcagggagataagcttacttgacccagtctctctcctagtccatatcagaaccaagattcaaacaggttttgtttagaaaatctaggatttttcagccataccaaaataaagtagcctcagggaatcaaaacatttacgaaagaaggtgacttctgaactgagtcttgcaagaattctggaaattaacctggcagttgtatcaggggtggtaaggggacggaacagcttgagcaagagtgagagttccttggggtttggggagggaggaggaaaaatgattttttacttaagaacaaatagcaaggaaggtttgtgagctatgattgggggctggaggggaaagcct

SEQ ID NO: 305 - DNA, 506 bp, Homo sapiens
ccacggggactgttattcgcaagctggttttctagacctgttagctggaagcatggtgagcaccatttctggacgctcaggccgtgtcgggcttcagtcatctccaccacacaggtacagcagcgctttctggtagtcgcccttagtgtcttgctggatataatagtacagggacttgccgtactttctcttgaattcagacctaattttcaacatgtccacttcactgcgggagaccatgattctgatcaggaccttatctcgcgtccccttgcccttcatggagtcatacagccgatcagcaaaatacaggggcttgttctgaatgcactgaaccaggttcaggaaagcattttccaggtctcctttaacctctttcctgatgctttccaacatgtcataagggctgtaactcttgtacctatcaaatactttctggaggtggggcacgctccgctcggtcatgatgctgatccacttgggaacatcagttcctttcctcttca

SEQ ID NO: 306 - DNA, 581 bp, Homo sapiens
  misc_feature 2, 159, 206, 463, 477, 530, 541: n = A,T,C or G
anatgttttaattgttgaaatacattggtgaattgagtaacttacattgcaatactaagtagatacacaagtcattatcaaattaatttccagatatcccactaaccatccatcgcaagtccttgaaaagttatagaaataatatgatgagattgtcgngatgtaaaatgagcaacccaaacagctatgaagtatttgtagttgcncatgcctttcacgaaagaaaataaaaatgtaatcaaaatgtgcatatggcatgcaaatttgagtttatttttaaatagtgcaatgaaatacacattgttcctaaaaaaggaaattctgacatttaaatgaaatttgaaaaccaaatagtaagaaatggaaagagatagttgtaagaatccatttaccaattttacagctaaaaattaaagtgaagtagaaatagcaaaagataacagacaaatatattattttaggncattaatttatagngccttatcatcttaagttataaatagaataaggattttgttatataaaaactntcaaaaaagtntcagtgaaaagacatgacctccatgaaatgtgctgagtgg

SEQ ID NO: 307 - DNA, 434 bp, Homo sapiens
  misc_feature 44, 177, 178: n = A,T,C or G
aaacagcttttggggggtactttggaagtgtctaataaggtgtnacaatttttggtagtaggtatttcgtgagaagttcaacaccaaaactggaacatagttctccttcaagtgttggcgacagcggggcttcctgattctggaatataactttgtgtaaattaacagccacctatnnaagagtccatctgctgtgaaggagagacagagaactctgggttccgtcgtcctgtccacgtgctgtaccaagtgctggtgccagcctgttacctgttctcactgaaaagtctggctaatgctcttgtgtagtcacttctgattctgacaatcaatcaatcaatggcctagagcactgactgttaacacaaacgtcactagcaaagtagcaacagctttaagtctaaatacaaagctgttctgtgtgagaatttttt

SEQ ID NO: 308 - DNA, 511 bp, Homo sapiens
ccgggaacgactgtatagagtatataaggaagtaaagaatcgcctggactatcatatatctgtgcagaacatgatgcgtcgaaaggaacaagaacacatgataaattgggtggagaagcacgtggtgcaaagcatctccacacagcaggaaaaggagacaattgccaagtgcattgcggacctaaagctgctggcaaagaaggctcaagcacagccagttatgtaaatgtatctatcccaattgagacagctagaaacagttgactgactaaatggaaactagtctatttgacaaagtctttctgtgttggtgtctactgaagttatagtttacccttcctaaaaatgaaaagtttgtttcatatagtgagagaacgaaatctctatcggccagtcagatgtttctcatccttcttgctctgcctttgagttgttccgtgatcacttctgaataagcagtttgcctttataaaaacttgctgcctgactaaagattaacaggttatagttt

SEQ ID NO: 309 - DNA, 336 bp, Homo sapiens
  misc_feature 43, 157: n = A,T,C or G
caggtccttgtggggaaggaagggagaattagggaggaggttncgagaactcaaggaagaggctgggcacagagggtctttgggtgcctgcagagctgggtcctggagctaccaggcaagaaccctgcttccgttttcctttccttggaaaaatgtnaagaactggcaggtgtaggaaattttgagactggagcagaaaggcacaaaagtcatttataaggtatgattgctcactctagtcctgaggcacatggggtggataaatgggggatcagagccacagggtccctggctctggtcatgcttgcccctggctggtaccatctctgagtttgg

SEQ ID NO: 310 - DNA, 308 bp, Homo sapiens
gccaaatagagctttgagtttttttgttggatatggagttactctttccatggcttacaggttgctgaaaagtaaattgtacctgtaaagaaaatcatacaactcagcatccagttggctttttaagaattctgtacttccaatttataatgaatactttcttagattttaggtaggaggggagcagaggaattatgaactggggtaaacccattttgaatattagcattgccaatatcctgtattcttgttttacatttggattagaaatttaacatagtaattcttaagtcttttgtctgattttt

SEQ ID NO: 311 - DNA, 594 bp, Homo sapiens
cctccctcacttcccatacccagtctaggagctccttctggctcccaagcacccagagctttcctccgccttttagttttggttcctccactggaatgtaggctcctcacgggcgatggctgtcttttcttgactttgtatcttcactgccaagcaaaaagtctgccaagtgggaatgtttaataaatattcattgaataatgaatgaaccatcttcgtacatgaataataatactgtcttacgtttttctggtgctttataatgtatacattacatctgagtattttattttatttaattttcaaaacaatcctttaaggtcaacattgttatccttattttgctgatgaggaaactaaggttagaaacattttgatttcctctaggacgtatagctaggaagtgttactatcttgatttgaacaaattttctggtgctaagtctgatgttctttccatgaatcattgtggtggttgagatggagctttgtaatgggaataaaacagtaccttaggttctttctgaaaaggaggtatctagcaatggataaatagataccactgaatgaaattaaatgttgattaggaacaaa

SEQ ID NO: 312 - DNA, 468 bp, Homo sapiens
cggccgaggtctgaggtgagcagcaggaaatgccaacaagccctggcagaactggagagtgtcctcagccacctggaggacttctttgcacggacactagtaccgcgagtgctgattctccttgggggcaatgccctaagccccaaggagttctatgaactcgacttgtctctgctggccccctacagcgtggaccagagcctgagcacagcagcttgtttgcgccgtctcttccgagccatattcatggctgatgcctttagcgagcttcaggctcctccactcatgggcaccgtcgtcatggcacagggacaccgcaactgtggagaagattggtttcgacccaagctcaactatcgagtgcccagccggggccataaactgactgtgaccctgtcatgtggcagaccttccatccgaaccacggcttgggaagactacatttggttccaggcaccagtgacattt

SEQ ID NO: 313 - DNA, 446 bp, Homo sapiens
  misc_feature 28, 201, 214, 235, 246, 253, 285, 356, 367, 369, 382, 412,432, 434: n = A,T,C or G
gctttttttttttttttttttttttttnggaaattgaaaaagatgtattaaaatattcacaaaaatacaactgaagatcaaaaaataataatgagcttgatggtttttccctagctgatatatttccattgaaaaactagagatagtttgaaatttcaatctctaagtaatgccttttgagtgctcccatacagaattagngcataattttaanacgaccctgtttgccaggacnaaaacatgganagggcanatctgccctttaggcaaccttagttcgttatntgcaaccaggaaaggagtgctgaggcacagggaaaaggggagccaaaagggctgcaggggtgggtgtgcanggcttgggaanangtcctgccctganaggctcatctcaatgtgagcagcttccttnagggaaacctgtcctggcanancaccatgctggc

SEQ ID NO: 314 - DNA, 473 bp, Homo sapiens
  misc_feature 318, 332, 427, 437, 443, 461, 463, 470: n = A,T,C or G
ctgcttaactctcccgaaactaaacttgagcctccattatggcatgctgaatttaccaaagaagaattggttcagaagctcagttccaccacaaaaagtgcagatcacttaaacggcctgcttcgggaaacagaagcaaccaatgcaattcttatggagcaaattaagcttctcaaaagtgaaataagaagattggaaaggaatcaagagcgagagaagtctgcagctaacctggaatacttgaagaacgtcttgctgcagttcattttcttgaagccaggtagtgaaagagagagacttcttcctgttataaatacnatgttgcagctcanccctgaagaaaagggaaaacttgctgcggttgctcaagatgaggaagaaaatgcttcccgttcttctggatgagcatcctatcttcgtagttggnttggacttcnataggntgatggaaggaatacttntnttaaccnaat

SEQ ID NO: 315 - DNA, 348 bp, Homo sapiens
gctgagaaaatgtaaggattctggaatacatattccatgggactttccttccctctcctgcttcctcttttcctgctccctaacctttcgccgaatggggcagcaccactgacgtttctgggcggccagtgcggctgccaggttcctgtactactgccttgtacttttcattttggctcaccgtggattttctcataggaagtttggtcagagtgaattgaatattgtaagtcagccactgggacccgaggatttctgggaccccgcagttgggaggaggaagtagtccagccttccaggtggcgtgagaggcaatgactcgttacctgccgcccatcaccttggagg

SEQ ID NO: 316 - DNA, 344 bp, Homo sapiens
  misc_feature 4, 26, 29, 53, 80, 91, 321: n = A,T,C or G
accntgtgctgcacttaaaatattgntgnttgattatttgatttttacatcanagctttataacacgaacttttgtacanaattgtgagtngtgaccatgtaacatgagaggttttgctagggcctattatttttaaccaccattaattagttggggtggagtttactgtaatgtgaaattttcacatttgaattttttaattgcctggcaaaagctgatataagttctaaaatatcagcagaatgatttgctgaattcattacaaccctgttatgtcactttttgattacaataaaagttttcagtaaactttgcaaaanaaaaaaaaaaaaaaaaaaaaaaa

SEQ ID NO: 317 - DNA, 201 bp, Homo sapiens
ggctgaggagccgatgcaaacccccaaggcgacgcacttgggagccggtggtctcaaacacctgccgggggtcctagtccccttctgaaatctacatgcttgggttggagcgcagcagtaaacaccctgcccagtgacctggactgaggcgcgctgggggtgggtgcgccgtgtggcctgagcaggagccagaccaggagg

SEQ ID NO: 318 - DNA, 485 bp, Homo sapiens
cccaaggccccaggcagaggcagaacttctgcagccagaacccggcttggatgcccactttgtagcttctccttctccattctcagtcagaccccctgggatgaaggggagggcaggggtggaggcaccttgaggccaagccagcaggtgggggtgctgcttgctcactcttgcatccctagctaggtcagcaccagctcctctgggccccaggacagtctgtggagcctgctcctcacctgccctgggagcctagggtaccaagggtaccgaggaagccatgggtagtggggacaccatgggtactgagggtactgagggtcctgagggcttgaaggtggggtcctcagggatgtagacagtgctgttcccttcaggcatctcccagtagaccgcatcctcaaagcagttctcatctgaaggttgtccccagaatggtaatctcaaaatgagccccacaatgatgccacccatcagggccatgg

SEQ ID NO: 319 - DNA, 284 bp, Homo sapiens
ccttttcagaacccttcaggccatgctcttgggtgtctggattctgctgcttctggcatctctggcccctctgtggctgtactgctggagaatgttcccaaccaaagggaaaagagaccagaaggaaatgttggaagtgagtggaatctagccatgtctctcctgattattagtgcctggtgcttctgcaccgggcgtccctgcatctgactgctggaagaagaaccagactgaggaaaagaggctcttcaacagccccagttatcctgcccccatgaccgtgg

SEQ ID NO: 320 - DNA, 251 bp, Homo sapiens
aaatgaaatttgaaaaccaaatagtaagaaatggaaagagatagttgtaagaatccatttaccaattttacagctaaaaattaaagtgaagtagaaatagcaaaagataacagacaaatatattattttaggtcattaatttatagtgccttatcatcttaagttataaatagaataaggattttgttatataaaaactatcaaaaaagtatcagtgaaaagacatgacctccatgaaatgtgctgagtgg

SEQ ID NO: 321 - DNA, 627 bp, Homo sapiens
  misc_feature 44, 53, 188, 565: n = A,T,C or G
ctgaattgagcaaagaagaccgagagaccctctatccaaccttnggcaaactntatcctgaggggttgcggctgttggctcaagcagaagactttgaccagatgaagaacgtagcggatcattacggagtatacaaacctttatttgaagctgtaggtggcagtgggggaaagacattggaggacgtnttttacgagcgtgaggtacaaatgaatgtgctggcattcaacagacagttccactacggtgtgttttatgcatatgtaaagctgaaggaacaggaaattagaaatattgtgtggatagcagaatgtatttcacagaggcatcgaactaaaatcaacagttacattccaattttataacccaagtaaggttctcaaatgtagaaaattataaatgttaaaaggaagttattgaagaaaataaaagaaattatgttatattatctagactacacaatagtaagccacactatatcttcatgagttgcaaatccatggaaacacagtaaaccagccctgaaacaaagcatttccttgttttcagtggtattagatcttgnttccacgtctgtctcattcttcactgggccttacaggttagttttaattaactctatgggat

SEQ ID NO: 322 - DNA, 251 bp, Homo sapiens
  misc_feature 179, 190, 191, 192, 227: n = A,T,C or G
aatagtaatatcagaacaggaaggaggaatggcttgctggggagcccatccaggacactgggagcacatagagattcacccatgtttgttgaacttagagtcattctcatgcttttctttataattcacacatatatgcagagaagatatgttcttgttaacattgtatacaacatagncccaaatatannnagatctatactagataatcctagatgaaatgttanagatgctatatgatacaactgtgg

SEQ ID NO: 323 - DNA, 190 bp, Homo sapiens
  misc_feature 129: n = A,T,C or G
aaaatgcattatgcagagtttctagcagatgataacagtgacaattgcagagtactgatttttaatgtcaattgtttgttccctgcagaacttactgataatgtccctgcaggaaattgtgatattttntgcgctacagtaactttgaggattgaaatgaaacagcattcccaatgacattaagaattgg

SEQ ID NO: 324 - DNA, 424 bp, Homo sapiens
  misc_feature 257, 305, 356, 369, 385, 389, 400, 410, 418: n = A,T,C or G
aaaaccacttggaaggccatctctataaaaatgattttcccaggacagtaaccagatgtaacctaacccaacaccatcttaattggcagaggttcagtgggctggagttttgtgctcctcccccacaccaagtttttataatacaaatgccacaagaaaaagaacttcggtactgtttcctcagcagaggagaaaaactcaacctagttatgagaccaaccacacaacacaatgaaaagctgcactaactagttcanaatgttagttaagatgatgctggtgtgaataactcgttttttctagancccttataaataaaatcccccagttagtgtttgcattatcagctagagggntaacatgtggtanaatgaggacttatgcnaggnataaatgcgcntagcattttnctactatnagaaca

SEQ ID NO: 325 - DNA, 221 bp, Homo sapiens
cctctacctgtaatcacattaatttttctaaagacaatttggtgttttgaagataaatgtcattagtctatgataatagcatcataggacaattagccattttagacttgaccatattttctctttttagcatatagccatcttgatatttaggtgggagactactccaatggagcaacagtttcattttacatgattggatttagaaatttacaaatttt

SEQ ID NO: 326 - DNA, 412 bp, Homo sapiens
ccaggcattaaacttagtaacattaagtacactttagtactacagcagtcaaagagatctccactagagatcagaaagaagcaccactattttcttctatgacgtgtatgtgttggtcatgagcatgctagtatgaataaggcaatgtgttaagcactggcatacaaatgcagctaaaggtgctgaaggaaggcagtggggtggtgcaggcacacagcagggagctcttccccgtgacacgttagtcatcttctccacagagcagcagaagagctttcttatagtccccagatgtatctcccttaatcatggaataaagagaggtggcaaaattcttcctaaactccttcctgatgttaaacagatcaatctcactcctgaaaaccatgactctgatgagggtatgatcatc

SEQ ID NO: 327 - DNA, 501 bp, Homo sapiens
  misc_feature 33, 187, 206, 215, 300, 443: n = A,T,C or G
ccatgaatttgatggagatgagcagttctacgnggacctggagaggaaggagactgcctggcggtggcctgagttcagcaaatttggaggttttgacccgcagggtgcactgagaaacatggctgtggcaaaacacaacttgaacatcatgattaaacgctacaactctaccgctgctaccaatgangttcctgaggtcacagtgntttccaagnctcccgtgacactgggtcagcccaacaccctcatttgtcttgtggacaacatctttcctcctgtggtcaacatcacatggctgancaatgggcagtcagtcacagaaggtgtttctgagaccagcttcctctccaagagtgatcattccttcttcaagatcagttacctcaccttcctcccttctgctgatgagatttatgactgcaaggtggagtactggggcctgnaccagcctcttctgaaacactgggagcctgagattccagcccctatgtcagagctcac

SEQ ID NO: 328 - DNA, 530 bp, Homo sapiens
ctcgggatctctatgacgctggagtgaagaggaaaggaactgatgttcccaagtggatcagcatcatgaccgagcggagcgtgccccacctccagaaagtatttgataggtacaagagttacagcccttatgacatgttggaaagcatcaggaaagaggttaaaggagacctggaaaatgctttcctgaacctggttcagtgcattcagaacaagcccctgtattttgctgatcggctgtatgactccatgaagggcaaggggacgcgagataaggtcctgatcagaatcatggtctcccgcagtgaagtggacatgttgaaaattaggtctgaattcaagagaaagtacggcaagtccctgtactattatatccagcaagacactaagggcgactaccagaaagcgctgctgtacctgtgtggtggagatgactgaagcccgacacggcctgagcgtccagaaatggtgctcaccatgcttccagctaacaggtctagaaaaccagcttgcgaataacagtccccgtgg

SEQ ID NO: 329 - DNA, 160 bp, Homo sapiens
  misc_feature 73, 82, 88, 106, 123, 134: n = A,T,C or G
caagctttttttttttttttttttttttttttttcggaatgattaaagatgtctttataaagtttttttcaanacttcattntaaatncacagaataaaaaatggngtcagctcacttgtaanacatcaaccanattttccttatactgtctcaaaattt

SEQ ID NO: 330 - DNA, 361 bp, Homo sapiens
cacagagcttggcagagctgcaaagctggcaccagaatttgccaagaggaatgttaagttgattgccctttcaatagacagtgttgaggaccatcttgcctggagcaaggatatcaatgcttacaattgtgaagagcccacagaaaagttaccttttcccatcatcgatgataggaatcgggagcttgccatcctgttgggcatgctggatccagcagagaaggatgaaaagggcatgcctgtgacagctcgtgtggtgtttgtttttggtcctgataagaagctgaagctgtctatcctctacccagctaccactggcaggaactttgatgagattctcagggtagtcatctctctccag

SEQ ID NO: 331 - DNA, 342 bp, Homo sapiens
  misc_feature 167, 306, 307, 308: n = A,T,C or G
cctctgttcattcctaatgtttacatggttctctactctgaagggcaccaacatggacctcaccttcttaacatggaaaatcaaaatctaaatgaatacaattaaaaggaggcagcaaccttcttgcagtgggtcccttaaacattatgaaaacatcagtgcattgngtagtctgttacgctataaactgaggtctctttatgaaagattattttagcacaaattcagaatgaagccagtccaagaaaaaaagaattggaagctatttgaaggttagataggaaatataccaaaaatagaagagcnnnggatgggctgcaccacatcctaccacgcaagcac

SEQ ID NO: 332 - DNA, 425 bp, Homo sapiens
  misc_feature 34, 110, 131, 140, 176, 186, 188, 211: n = A,T,C or G
tttttttttttttttttttttttttgcattcaanataaaagatttattcacaccacaaaaagataatcacaacaaaatatacactaacttaaaaaacaaaagattatagngacataaaatgctatattctntttttaagngggtaaaagtattttgtttgcttctacataaatttntattcatgananaataacaaatattaaaatacagngatagtttgcatttcttctatagaatgaacatagacataaccctgaagcttttagtttacagggagtttccatgaagccacaaactaaactaattatcaaacacattagttatttccagactcaaatagatacacattcaaccaataaactgagaaagaagcatttcatgttctctttcattttgctataaagcattttttcttttgactaaat

SEQ ID NO: 333 - DNA, 304 bp, Homo sapiens
aaaattacaccaggtacagggttgaacataatctcatgaaataaatgtttaagaaaatagttttgaaaaagatctcatactgaagccatgttaaattttgataaaccaggttatataaatcaagtcgtttattcagttaatgaaaatatgcctaacctttcttatactcataaataagtacttatatataatctttatatacaagtgaagaaaagttcaatgtaaaaaatatactgccaatccacttattatggttgaaatatttatctacacattagactgcattgatgaaaatgtccaattt

SEQ ID NO: 334 - DNA, 406 bp, Homo sapiens
aaaaaaaattttttttggggggggtggtttgcttttttttcttttttaagaaaaataaaacttttcagaacaaagtagatgagaattttgttgttgttgttgtgatattaacagtgctacagttactttcctgaaagtctgggatttgacgctattgtgacatttatttatgtgaaatattcatacctaagaattcccctgtattaaataaagtttattttcattaataaaattaccatcagaatttagtttctcaattttgtatgctacttttcaccttttccttttttccagttcttaaaatctccagttctacttaaccagctatgatcttaaacgaaaagaaggcttatcttgtgtaatgttacccattccctagactctagataactgtagaagtagtttt

SEQ ID NO: 335 - DNA, 561 bp, Homo sapiens; identical to SEQ ID NO: 237

SEQ ID NO: 336 - DNA, 415 bp, Homo sapiens
ctgctgaggtacaccattataaaagaagttctatgaatttacaattctaccttccaatttcctgggagaaaaaaccaaactcttgaaggtcttcaccagagaccctgagagggattaacacttttgatgaagacatagtcaataattcatgattgaactattcaaaaacatgtatttatttagaacaatagaaatacgtgttctcagactgtcctctggagtttttgagactattagttcaagagtttcaaagtatattacttgtaaaaacaatactgattaaaaaaattttttttaacaaaaaaacagaaatctgatttgatggtaccttgaaaataccctaaataccaaattttctccaacctaacattacagctaatttaagaattcctccttcattggtaaaacatttttt

SEQ ID NO: 337 - DNA, 419 bp, Homo sapiens
aaatgccaccagtgtcacaaatggaacacatcctgaagccacttcagagcaaccacagcagaacagtacacaagactctggactacgggaaagtgaagtatcagcagaaaatatcttaactgtagccaaggatccaagatatgccagatatctcaaaatggttcaagtgggtgtaccagtgatggcaataagaaacaaaatgatatcagaaggactagacccagatcttcttgagaggccagatgctccagtgcctgatggcgaaagtgagaaaactgtagaagaaagttcagatagcgaatcttcttttagtgattaagcttaattttgataagaattacatatgcatgcataggggtacatttacattctgtaagagattgagcctgaactctcttagtcataaaaacatcaaatgg

SEQ ID NO: 338 - DNA, 262 bp, Homo sapiens
  misc_feature 15, 26, 31, 40: n = A,T,C or G
gtgaaacatagccantgattgatcanaattntggaatctnaatattaaaaccttacttagtgactggaatggtatacgctccctccaaaagtttatctttgtttattgattaaaggtaatccttactttctttgtattacttaggttcttaattaaaggtaatccttactttctttgtattacttaggttcttaaatttctatgataaacatgtattgctaaataataaaaagtaaaaaaaaaaaaaaaaaaacctgcccgg

SEQ ID NO: 339 - DNA, 316 bp, Homo sapiens
  misc_feature 138, 303: n = A,T,C or G
aaaaagcagcagtgtcctatgaagtggaaatgtcagttctagagcattggatgtgaagttctggtcatgtcaccttgcgtgtctcaccctggaggagtgaaggtgggcgcccggcgggggggtgtggctgcaccccancaccgggagggggcacgcacgacaccagaggaagggacagccccacccatgtcaacagcaggcaacctgtgttttcatttcaagtgggatacagtatttttttaataaggagccatacttttttttaagagtttgagatctgaatgtgatttctaattgtatcanacgttaatgtttt

SEQ ID NO: 340 - DNA, 553 bp, Homo sapiens
aaagttttttttctccctcaagtataaatagtggtaactatatgttttgtatcttctagcaccaactgctgtaaagcaatgctgcaaataatgcttgaatacaagtggctaagccaacaacagaataaatacttttatagtagttttataatcctgaaattcgaaagctttcccaattgcacttgcatctaaacaaaactgttgcagtttttactctatttattttgttccccatgtttatgaaagtcctgcacagtttcaaaggcatggtaaataatatatcaatgtttatgtagtctgttacagaaacagctatagataacattatccagtgaagagcaaaattcaagctttagaaaatattcatgcatgcaattttgacatatctaaaaataggtttttttatatttatggtgggaggtggttgggaacttttaacaaaatggggtgttaatttttgtacagtctgtgggcatttacacatttttaatgtattaaaatttggtaattatgtgtacattaaattaataaaagttacttctagttatgattt

SEQ ID NO: 341 - DNA, 221 bp, Homo sapiens
ctgtcataaactggtctggagtttctgacgactccttgttcaccaaatgcaccatttcctgagacttgctggcctctccgttgagtccacttggctttctgtcctccacagctccattgccactgttgatcactagctttttcttctgcccacaccttcttcgactgttgactgcaatgcaaactgcaagaatcaaagccaaggccaagagggatgccaag

SEQ ID NO: 342 - DNA, 328 bp, Homo sapiens
ccaggattttcatgaggggccgtagcttgagccaccactgttctttgggaatcctgtgctcaaaatccgtttgcttcttcagctctgccacaggttgaaaaataacgtttcttttgcttattcccagcacacaaatggaatcatcggtggtaaatttttttcctctgccccgggcctccttgagttttgcagtgatccactccatagctctggcagagattttggttccaaagtttctatcaaatggagagggtgccccaccctgctgcatgtgacccagcacgttcttcctgcagtcaaacacgcctttgccctcttctgaatacag

SEQ ID NO: 343 - DNA, 138 bp, Homo sapiens
  misc_feature 8, 18, 20, 69, 105, 107, 126, 127, 133: n = A,T,C or G
caaagctntattttcatntntcatcttttgtcctccttagcacaatgtaaaaaagaatagtaatatcanaacaggaaggaggaatggcttgctggggagcccatncnggacactgggagcacatanngattcncccat

SEQ ID NO: 344 - DNA, 582 bp, Homo sapiens
cctcacaatgcacgtgggagatgaagtcaactggtatctgatgggaatgggcaatgaaatagacttacacactgtacattttcacggccatagcttccaatacaagcacaggggagtttatagttctgatgtctttgacattttccctggaacataccaaaccctagaaatgtttccaagaacacctggaatttggttactccactgccatgtgaccgaccacattcatgctggaatggaaaccacttacaccgttctacaaaatgaagacaccaaatctggctgaatgaaataaattggtgataagtggaaaaaagagaaaaaccaatgattcataacaatgtatgtgaaagtgtaaaatagaatgttactttggaatgactataaacattaaaagaagactggaagcatacaactttgtacatttgtgggggaaaactattaattttttgtaaatggaaagatcaacagactatataatgatacatgactgacacttgtacactaggtaataaaactgattcatacagtctaatgatatcaccgctgttagggttttataaaactgcatttacctcggcc

SEQ ID NO: 345 - DNA, 439 bp, Homo sapiens
aaaaaagtgctcaaatctaatccaagtgaaaatgaagaaaaggaagcacagtctcaacttataaaatctgatgaaatgcagcgtttgcgttcacaagcacttaacgcttttggaagtggagattatactgctgctatagccttccttgataagattttagaggtttgtgtttgggatgcagaactacgggaacttcgagctgaatgttttataaaagaaggagaacctaggaaagctataagtgacttaaaagctgcgtcaaagttgaagaatgataatactgaagcgttttataaaataagcacactgtactaccaactaggagaccacgaactgtccctcagtgaagttcgggaatgtcttaaacttgaccaggatcataaaaggtgttttgcacactataaacaagtaaagaaacttaataagctgattgagtcag

SEQ ID NO: 346 - DNA, 328 bp, Homo sapiens
aaaaagtacatctctctccctcctcccccacatgcacaaggctcacatctcattatggtgcggcccatgtacattaaagtgtgatacttggttttgaaaacattcaaacagtctctgtggaaatctgagagaaattggcggagagctgccgtggtgcattcctcctgtagtgcttcaagctaatgcttcatcctctctaataacttttgatagacaggggctagtcgcacagacctctgggaagccctggaaaacgctgatgcttgtttgaagatctcaagcgcagagtctgcaagttcatcccctctttcctgaggtctgttggctg

SEQ ID NO: 347 - DNA, 542 bp, Homo sapiens
cgcgggctgactggtgtttatccgtcactcgccgaggttccttgggtcatggtgccagcctgactgagaagaggacgctcccgggagacgaatgaggaaccacctcctcctactgttcaagtacaggggcctggtccgcaaagggaagaaaagcaaaagacgaaaatggctaaattcgtgatccgcccagccactgccgccgactgcagtgacatactgcggctgatcaaggagctggctaaatatgaatacatggaagaacaagtaatcttaactgaaaaagatctgctagaagatggttttggagagcaccccttttaccactgcctggttgcagaagtgccgaaagagcactggactccggaaggacacagcattgttggttttgccatgtactattttacctatgacccgtggattggcaagttattgtatcttgaggacttcttcgtgatgagtgattatagaggctttggcataggatcagaaattctgaagaatctaagccaggttgcaatgaggtgtcgctgcagcagcatgca

SEQ ID NO: 348 - DNA, 179 bp, Homo sapiens
ccaaagaagagcctggtgttggtgcatgtgctttggactagcatttatgcttgcaggtgttattctaggaggagcatacttgtacaaatattttgcacttcaaccagatgacgtgtactactgtggaataaagtacatcaaagatgatgtcatcttaaatgagccctctgcagatgccc

SEQ ID NO: 349 - DNA, 133 bp, Homo sapiens
cggccggcaggtccagcgacagcctggcctgggaatggactggcagctcatcactaaaatgactcctttcatggaatccactgttatgcagccacactgaccacagagcaactgaataggtgagcattggatt

SEQ ID NO: 350 - DNA, 534 bp, Homo sapiens
  misc_feature 526: n = A,T,C or G
ttttagaaaaggtatgtcagactgggattaatgacagcatgattttcaatgactgtaaattgcgataaggaaatgtactgattgccaatacaccccaccctcattacatcatcaggacttgaagccaagggttaacccagcaagctacaaagagggtgtgtcacactgaaactcaatagttgagtttggctgttgttgcaggaaaatgattataactaaaagctctctgatagtgcagagacttaccagaagacacaaggaattgtactgaagagctattacaatccaaatattgccgtttcataaatgtaataagtaatactaattcacagagtattgtaaatggtggatgacaaaagaaaatctgctctgtggaaagaaagaactgtctctaccagggtcaagagcatgaacgcatcaatagaaagaactcggggaaacatcccatcaacaggactacacacttgtatatacattcttgagaacactgcaatgtgaaaatcacgtttgctatttataaacttgnccttagat

SEQ ID NO: 351 - DNA, 244 bp, Homo sapiens
cctctttttaccagctccgaggtgattttcatattgaattgcaaattcgaagaagcagcttcaaacctgccggggcttctcccgccttttttcccggcggcgggagaagtagattgaagccagttgattagggtgcttagctgttaactaagtgtttgtgggtttaagtcccattggtctagtaagggcttagcttaattaaagtggctgatttgcgttcagttgatgcagagtggggttttgc

SEQ ID NO: 352 - DNA, 354 bp, Homo sapiens
cctggggcctggtgccgggctgcctgtctttggttttacttccttgttgttttttctttttttcttaaaacaggtactgagtataaaacaatatgagaaggtttctctcttccctcatttcctccttttgagactcttactttttattagtgggagttctcacttttatttttgctacttatgtctttttgtgcaatagtttgatagtgatttatatagtacacttgtgctgaagcattttggtgaactaaggtagcgatgaagcttttttatcatttgaagaagtacaggtagcaaacaaggaagcagtaaacaggttcttattactattataaattctattataagagtttt

SEQ ID NO: 353 - DNA, 247 bp, Homo sapiens
ctgcattctccccggatgcagacctgcccgttggtagggactctgctcacacggaacatggacggttacacctgtgccgtggtgacgtccaccagcttctggatcatctcggcgtgggtgttgtggaagggcagcccatccacctccatgcccacgatgcccgagacgccactccggactttgtgctgcaccaagatgcccagcattttttcttccttaatgaccgacgggagggcctgagtccagg

SEQ ID NO: 354 - DNA, 232 bp, Homo sapiens
ccagcgacagcctggcctgggaatggactggcagctcatcactaaaatgactcctttcatggaatccactgttatgcagccacactgaccacagagcaactgaataggtgagcattggattgttgatgacaactcttcagcagaacaattgtgtgtttgaagggactgttttatgatgaaataactgttatttcctggagctaattgttgaatgacagtttgtcaactgttt

SEQ ID NO: 355 - DNA, 379 bp, Homo sapiens
cagatagtagtgtggtggtttttttttttaatcattatgaagagtgggagcttgcaggtaaggcttctgtggtggtttgaaaagcagaaagcaataaatgaaacaaagtgtttgtgtaatatattcctgccttgtcttcttcactcagagttgaaataggttttgcagtaaagctggaaaaaaaaagaaaacaaatgttcaaaactgtgtgtgttggtgggtggaatttcctttgcttatagtagtttcagtagtaactatatgtttttttttcctttctttttcacaggcacagaaaactgaatctgtagataacgagggagaatgaattgtcatgaaaaattggggttgattttatgtatctcttgggacaactttt

SEQ ID NO: 356 - DNA, 476 bp, Homo sapiens
  misc_feature 419: n = A,T,C or G
aaaattcttagataattttttctacaggctataattacctgctccagtcaccaatggttattgttcaatttaactacatcaattataaacctcttatatccttaaagaaaattttaagtgaaaattacaatttcttaccaaaaggtttagggttttccaaatttcaaatatttgcttccccctcccccctttccagtcaaacatttcaaataaactaaaaataaccacatctcacctgcaacattcaataatagcaatcacttgatgtataaaattttaactatgcccccagttattttaagacacaaaaaaatggctgcctaccaatctgtcttcacaagttagaaatactacatttaagatttaacatgagggtttcaagtttcctccagtttaggcatttatacctttgtgcttgntttgtttcaggatgttactatagcattgatattggataacccatatttatatacttt

SEQ ID NO: 357 - DNA, 575 bp, Homo sapiens
  misc_feature 534: n = A,T,C or G
aaattgtgtatgtgcatatgaagcacagacatgcatgtgtgtgtgtgtctgtgtgtgtgtgtccgtgtatgtgtgtgtgggttctaatggtaatttgcctcagtcatttttttaatatttgcagtacttgatttaggatctgtggtgcagggcaatgtttcaaagtttagtcacagcttaaaaacattcagtgtgactttaatattataaaatgatttcccatgccataatttttctgtctattaaatgggacaagtgtaaagcatgcaaaagttagagatctgttatataacatttgttttgtgatttgaactcctaggaaaaatatgatttcataaatgtaaaatgcacagaaatgcatgcaatacttataagacttaaaaattgtgtttacagatggtttatttgtgcatatttttactactgcttttcctaaatgcatactgtatataattctgtgtatttgataaatatttcttcctacattatatttttagaatatttcagaaatatacatttatgtctttatattgnaataaatatgtacatatctaggtatatgctttctctctgct

SEQ ID NO: 358 - DNA, 320 bp, Homo sapiens
gataaatctaagaagtattttacccactggtggtttgtgtgtgtatgaaggtaaatatttatatatttttataaataaatgtgttagtgcaagtcatcttccctacccatatttatcatcctcttgaggaaagaaatctagtattatttgttgaaaatggttagaataaaactatgactctataaggttttcaaacatctgaggcatgataaatttattatccataattatagtaataataaccttaataagcataagaaaaacagagtcactctggatttcaaaaatgtcaaaaaatgagcaacagagggtccttattt

SEQ ID NO: 359 - DNA, 512 bp, Homo sapiens
  misc_feature 10, 30, 332, 403, 457, 462, 475: n = A,T,C or G
aatggaaganaactttgccgttgaagctgntaactaccaagacactattggccgcctgcaggatgagattcagaatatgaaggaggaaatggctcgtcaccttcgtgaataccaagacctactcaatgttaagatggcccttgacattgagattgccacctacaggaagctgctggaaggcgaggagagcaggatttctctgcctcttccaaacttttcctccctgaacctgagggaaactaatctggattcactccctctggttgatacccactcaaaaaggacacttctgattaagacggttgaaactagagatggataggttatcaacnaaacttctcagcatcacgatgaccttgaataaaaattgcacacactcagtgcagcaatatattaccagcangaataaaaaagaaatccatatcttaaagaaacagctttcaagtgcctttctgcngtttnttcaggagcgcangatagatttggaataggaataagctctagttcttaac

SEQ ID NO: 360 - DNA, 373 bp, Homo sapiens; identical to SEQ ID NO: 243

SEQ ID NO: 361 - DNA, 538 bp, Homo sapiens
tgtggtttggctgggggcgtggaacagtttatctcagacatctgccccaagaaggacgtactcgaaaccttcaccgtgaagtcctgtcctgatgccatcaaagaggtcttcgacaataaattccacatcatcggcgcagtgggcatcggcattgccgtggtcatgatatttggcatgatcttcagtatgatcttgtgctgtgctatccgcaggaaccgcgagatggtctagagtcagcttacatccctgagcaggaaagtttacccatgaagattggtgggattttttgtttgtttgttttgttttgtttgttgtttgttgtttgtttttttgccactaattttagtattcattctgcattgctagataaaagctgaagttactttatgtttgtcttttaatgcttcattcaatattgacatttgtagttgagcggggggtttggtttgctttggtttatattttttcagttgtttgtttttgcttgttatattaagcagaaatcctgcaatgaaaggtactatatttgctagactct

SEQ ID NO: 362 - DNA, 287 bp, Homo sapiens
  misc_feature 251, 253, 254, 274: n = A,T,C or G
ccagaaggcacactgtgttggtggttatattaaaagtccttgagtattttgcttttcatgatcttgctcactgcaacttccgcctcccaggttcaggcgattctcctgcctcagcctcccaagtagctgcgactacaggcgtgtagcaccacacctggctaatttttgtatttttagtagagatgaggtttcaccatattggttttgtacaagctctttttttttttttttttttttttttttttattttntnntttttttttttttttttttnttttttttttttt

SEQ ID NO: 363 - DNA, 437 bp, Homo sapiens
aaaaattctaaaatatttaataattaatattgatgggaagactgatatacaatgcaattatttattttacaaggagattctatacatcagggaggcatcttgaagtacaatacaccaggctttcatttcttctttacattatgattgtgagtttccatataagttggtacttacatggaaagggaacacaaaatccatttttatatacataaaaacaaaacacccaaagagacttgacccccaaaatgtcttgtttcacttgaaaataacatgaatgagacgaaagatgaaccagattacttggtgacgcacagaaggcgaacaagtagctcaggaaatcaaatcctgtttcaagcttggcacattaagggtaagaaaggtagtgaaagaagggttcgaaaatatcatctcaagccacaaaaaatctggcagaagac

SEQ ID NO: 364 - DNA, 553 bp, Homo sapiens
  misc_feature 539: n = A,T,C or G
ctgcagcataatttaggcattggaggagctgtggttgtaacactctacaagatgggttttccggaagccgccagttcttttagaactcatcaaattgaagctgttccaaccagctctgcaagtgatggatttaaggcaaatcttgtttttaaggagattgagaagaaacttgaagaggaaggggaacagtttgtgaagaaaatcggtggtatttttgccttcaaggtgaaagatggccctgggggtaaagaggccacctgggtggtggatgtgaagaatggcaaaggatcagtgcttcctaactcagataagaaggctgactgcacaatcacaatggctgactcagacttcctggctttaatgactggtaaaatgaatcctcagtcggccttctttcaaggcaaattgaaaatcactggcaacatgggtctcgctatgaagttacaaaatcttcagcttcagccaggcaacgctaagctctgaagaactccctttggctacttttgaaaatcaagatgagatatatagatatatatccntacattttattgtc

SEQ ID NO: 365 - DNA, 316 bp, Homo sapiens
aaaattatctattttagatctaaggaaatactacagagatattttcatgggttcagtaacttttcattttataacattgggcacggtacagagtgattgtcacataaggtacttgaagatttattagtttaattctatttttacagtaaccttgaattcttctgagttttgcatgtattaaattcaattaatgctgaacatgaagagtaaagtatttatctgaaagaagtttctgggttaggagaagtaatgaatgtatccatttgtacatggtttacatgttgtggatgctttgtaaacattttcctgtatgttt

SEQ ID NO: 366 - DNA, 244 bp, Homo sapiens
gcaaaaccccactctgcatcaactgaacgcaaatcggccactttaattaagctaagcccttactagaccaatgggacttaaacccacaaacacttagttaacagctaagcaccctaatcaactggcttcaatctacttctcccgccgccgggaaaaaaggcgggagaagccccggcaggtttgaagctgcttcttcgaatttgcaattcaatatgaaaatcacctcggagctggtaaaaagagg

SEQ ID NO: 367 - DNA, 188 bp, Homo sapiens
cctccaaggtgatgggcggcaggtaacgagtcattgcctctcacgccacctggaaggctggactacttcctcctcccaactgcggggtcccagaaatcctcgggtcccagtggctgacttacaatattcaattcactctgaccaaacttcctatgagaaaatccacggtgagccaaaatgaaaagtac

SEQ ID NO: 368 - DNA, 535 bp, Homo sapiens
ctgtgctcgcgctactctctctttctggcctggaggctatccagcgtactccaaagattcaggtttactcacgtcatccagcagagaatggaaagtcaaatttcctgaattgctatgtgtctgggtttcatccatccgacattgaagttgacttactgaagaatggagagagaattgaaaaagtggagcattcagacttgtctttcagcaaggactggtctttctatcccttgtactacactgaattcacccccactgaaaaagatgagtatgcctgccgtgtgaaccatgtgactttgtcacagcccaagatagttaagtgggatcgagacatgtaagcagcatcatggaggtttgaagatgccgcatttggattggatgaattccaaattctgcttgcttgctttttaatattgatatgcttatacacttacactttatgcacaaaatgtagggttataataatgttaacatggacatgatcttctttataattctactttgagtgctgtctccatgtttgatgtatctgagc

SEQ ID NO: 369 - DNA, 169 bp, Homo sapiens
aaagaaaaaaatgtatatacagaaagagtataaaagtttgtgaatttaatgcaaattagcttccagtcttcacttcccaaatacttgatttatagttttgactcctttacatttttgccttcttaatttcaagatttgcaattttgccttcaaaacagatcattttttt

SEQ ID NO: 370 - DNA, 383 bp, Homo sapiens
aaataaaaaagcaatggcacgaatcaccacaaaatcatttaagtgatcatatccacaggctgttcttgtaattatatgctaaaaatttatgactgttctcattaacagcattcccccccttcattagagacatcaagagcttctgagaatgtgtagtttttcctaaagtactactaaaagtatcatgaacaccgtttgtgcagcattcatttacatcaccttttatttactatattctaaactcataaaatatttaacatttctctacttcatttcttatttacagtacagaggctcatctcttgtcacaatatggtttgtgcattaaaatccctgggaatagtactttcaagaacattttaataaattgactccgattattt

SEQ ID NO: 371 - DNA, 263 bp, Homo sapiens
aaaaaaccagctcttgggaaaactaatagagaactcactcactactctcaccatggcagggcattaatctatttatgagggatccatccttatgatccaaacacctcccactaaacccgacttccaacactggggatcagatttcaacatgagatttgaagcggacaaatatctaaactacagcaaagagtacagatcgggaggcatggcaagctctgctggtcactccaatggagtcaacatttcaagaatgttacaagcag

SEQ ID NO: 372 - DNA, 575 bp, Homo sapiens
ctggtgagcgaaggatgggagcagagaacagagctaaaacccctggttttcctttccccagatgtaaagcctgctagctggaactcacagaagattggaacaaaaagataggagatggacacctgggggactgctccagcacgaagggaagcgatgagcatcacacagcagggccattgcaggggacaggtgctgtaattcctgcccagagaacttgaaagcttacagtgtgctcacaggaaggaatcggctcagctagtccagaaattgctgcattcccatattacttagttctttattcatcctgtggtaaagagtcacccttgttttccgtatctataaaactgaaagacttaaaatttacttagcacagcacgcaacaccctagtaaatgctcaagaaatattatttcccttccttctagaaaccaaggctaaataaaacattcctgaattttatgttgtccaaaataacaaaacaaaacaacacctagttttttcctgtgttaagtgctgaccgtttgaccacaaaggcatggaacattaatcttcaaatgagccaggttcctttgccct

SEQ ID NO: 373 - DNA, 455 bp, Homo sapiens
cctacacgatttactgccaaaacagagtggagtacgagaaaagggtccgagcacaagccaagaagtttgcgccctcataagcagcgaccttgtggcatcgtcagaaggaagggattggtttggcaagaacttgtttacaacatttttgcaaatctaaagttgctccatacaatgactagtcacctgggggggttgggcgggcgccatcttccattgccgccgcgggtgtgcggtctcgattcgctgaattgcccgtttccatacagggtctcttccttcggtcttttgtatttttgattgttatgtaaaactcgcttttattttaatattgatgtcagtatttcaactgctgtaaaattataaacttttatacttgggtaagtcccccaggggcgagttcctcgctctgggatgcaggcatgcttctcaccgtgcagagctgcacttggcctcag

SEQ ID NO: 374 - DNA, 395 bp, Homo sapiens
  misc_feature 254, 311: n = A,T,C or G
cctgacctaggcttgggagtcaaactgctcatattgagcatattgttaagtgggtaaagccaagtaaaggtactgggtgtttttgtgaccacttgtgaatgggtgtatggagaactgaaaagggtatctgcatgaaggctcctgtctgactattccaggatccaatattactgccttctgaaacttcctctttagggtaaccatcatgtatgcccacgagggtgatagtaattcgtgagactgaagttgcttanagtacttctttgaccaaggaataccacagacaccctaccgatagaacagtggctcanatcttacttgctcctgcttacgaagtattcccaatcactggtcatctgaccctacttgaacactcctgaacagtcatgtttttt

SEQ ID NO: 375 - DNA, 380 bp, Homo sapiens
cctcagaaaggaagaaaggtataaaggaatgagagaggacataagaaaagaaagacaaaaccctaaatccacttacttcttaacatttagaattcaatacaatccattacatttgatgattcaagtacgctaagatttttcagggacatattttgtcgcttagtgcaaatatacttgtaatttttaggcataatccactcaaatcacaagtaagaaactcaccttactaaacaggtgaattataatatggagagtttattttttctctaatatggtaatcagcacaccagcaagaacattccctaaacctattaataagaatgaggtttgtaactgaatgtaaattaaattgctccattaatatgctaaaatatactttt

SEQ ID NO: 376 - DNA, 341 bp, Homo sapiens
ctcaggtgcaagtgccccagggggcggggtgcagaagaatccgagtgtttgccaggcttaaggagaggagaaactgagaaatgaatgctgagacccccggagcaggggtctgagccacagccgtgctcgcccacaaactgatttctcacggcgtgtcaccccaccagggcgcaagcctcactattacttgaactttccaaaacctaaagaggaaaagtgcaatgcgtgttgtacatacagaggtaactatcaatatttaagtttgttgctgtcaagattttttttgtaacttcaaatatagagatatttttgtacgttatatattgtattaagggcatttt

SEQ ID NO: 377 - DNA, 356 bp, Homo sapiens
ccacaccttattgacagctacccctcaggacatggaaaaggagctaggaattaagcacccactccacaggaagaagcttgttttagcagtgaaagccatcaacaccaaacaggaggagaagtctgcactgctagaccacatttgggtgacaaggtggcttgatgatattggcttaccccagtacaaagaccagtttcatgaatctagagttgacggacgaatgctgcaatacctaactgtgaacgatttactcttcttaaaagtcaccagccaactacatcatctcagcatcaaatgtgccattcacgtgctgcatgtcaacaagttcaacccccactgcctgcaccggcggccag

SEQ ID NO: 378 - DNA, 250 bp, Homo sapiens
aaataagaaaatattattagtcttgttatttgtacctaaatattttatcaatttgaaacacaaattcataaattgtcattattctcagaggcaacaaagcatagaaataaatatttaagttttttctttcttttcttcttcaatctgtgttttaaggctcagagcagacattaagaaatatcaaacaattttttataaaaagtttttcaaatgtttggcccaaagtgaagttgttctgttgatgttattt

SEQ ID NO: 379 - DNA, 400 bp, Homo sapiens
aaataactattcctcctccattccaccgactcccagcaccagccaggaggaccctcagttcagtgttcctcccactgccaacacacccacccccatttgcaagcggtccatgcgctggtccaacctgtttacatctgagaaagggagtgacccagacaaagagaggaaagccccggagaatcatgctgacaccatcgggagcggcagagccatccccattaaacagggcatgctcttaaagcgaagtgggaaatggctgaagacatggaaaaagaaatacgttaccctgtgttccaatggcgtgctcacctattattcaagcttaggtgattatatgaagaatattcataaaaaagagattgaccttcggacatctaccatcaaagtcccaggaaagtgg

SEQ ID NO: 380 - DNA, 536 bp, Homo sapiens
aaagttctttgatgtatttgattttctaaatctttatggttatgatttggaataaaatgtgcctaatcctgtgttacattctgttcttaaatctgaatgccttctcatttaattctgaggaaatatcacacaagtgtcttcattgaccttgaagaaatgtatatacagttgccttataaaacaacataaatttagaccataacttttatagagaaagggttttgtcaaatgttttctgaaaatctgagtaattcaaagcatgcctctgcccctttaatatttttaataacctgcattgttgctgtctgccaaatattaaattgaaatcttcatttcaattttattatctggaaagggcactggattgctctgcaaccaaagaaagcaatatggaatgaaaaaactcattcacttttgtcttattttcttttaaggtgtattggcatgtaatttgcatagagaaggtcctctggttagtctctcaaattgaggctgtttagggaaatccttattcagttggtggcagtggttggttt

SEQ ID NO: 381 - DNA, 579 bp, Homo sapiens
  misc_feature 551: n = A,T,C or G
ctgtgtagtaaagatgccttctggtgaatttgcacgtatatgccgagatctcagccatattggagatgctgttgtaatttcctgtgcaaaagacggagtgaaattttctgcaagtggagaacttggaaatggaaacattaaattgtcacagacaagtaatgtcgataaagaggaggaagctgttaccatagagatgaatgaaccagttcaactaacttttgcactgaggtacctgaacttctttacaaaagccactccactctcttcaacggtgacactcagtatgtctgcagatgtaccccttgttgtagagtataaaattgcggatatgggacacttaaaatactacttggctcccaagatcgaggatgaagaaggatcttaggcattcttaaaattcaagaaaataaaactaagctctttgagaactgcttctaagatgccagcatatactgaagtcttttctgtcaccaaatttgtacctctaagtacatatgtagatattgttttctgtaaataacctatttttttctctattctctgcaatttgnttaaagaataaagtccaaagtcagatct

SEQ ID NO: 382 - DNA, 575 bp, Homo sapiens
ctgcaaagtaccacacatagcagaaagacagaaatttatactggggggttggaagatatggctactgagtctgtaattccatttggaggttcaaaaaaccatttttacattgctattatttgtacagaccaagggacctaaattttgaaacagctagacagtgatataaacaaacatttatctctgggggtagaaaattaattataatacaagaatgaaaatgggcaaacagtatggaaggcacccacacctcctagcaccctttggttttctgatggagttcacacttcacacatcagtgcattggattgcagaaaatattgatattttatttcatcaaaagtgccatttggtgtgccactattgaaagcttatcgctgtctttttctccttcagcaagtagaggtcaatgaagcagggtgtgttagttacgcaaattcctataaggcactttacggttttcatattggacagtgaggtacacaggatatatttctagggttcgttgctgttaacaaaaagaagaagaagtagcaccatgttgtgacattagctgagtcaggcttcaacctgcc

SEQ ID NO: 383 - DNA, 584 bp, Homo sapiens
ccaatatggtggaaccctgtctctactaaaaatacaaaaattaagtggacatggtggctatcccagctactcaggtggctgaggcaggagaattgcttgagcccgagaggcagaggttgcagtgagccaagattctgccactacactctagcctggatgacagagccagactctgtctcaaaagaaaaaaaaaattatttaccaagctgtgttttcgtagtgttttttaattctccaaactgcttcagtatctgtagtgttttttacatttcaaagacttctcacatgtaacatttcattggaattagcactgtacatcatagttgatatggaaattattacatctacagatgaagaaaatgtagacgtaaagaaccatttgctctaatgtcatccagtgtaactgctaagagttaggattagactcaagtcctatccctaatcctgtatactaccctaaactcctaagcccccatacattgtactgcacagaatgctactagtgactgtactcatgcattcaaacaagttttggaaatgtgttaagcaaagctaaccagattcctggagtattacgcatcata

SEQ ID NO: 384 - DNA, 322 bp, Homo sapiens
ttttttttttcaaaacagaaaaaaacaaaacactttattttccacaaggaagagcaataggaaaaattaaatcatttcccacatattgttttcttaaaacagagcctacaaggacatattcagcaccaaataaaaaaggaaaaaaagagaaattacaaacagccatagaatataatctataaagcaaacatttaatattgcactttgttttgctaacattttggattttacttttcctaattgaaaaatcaggaatctatcttgaatactggaatacaactgtgaacctcacatcttatgtcaggaattgaccaatattttt

SEQ ID NO: 385 - DNA, 537 bp, Homo sapiens
aatcagactgtcgacattccagaaaatgtcgacattactctgaagggacgcacagttatcgtgaagggccccagaggaaccctgcggagggacttcaatcacatcaatgtagaactcagccttcttggaaagaaaaaaaagaggctccaggttgacaaatggtggggtaacagaaaggaactggctaccgttcggactatttgtagtcatgtacagaacatgatcaagggtgttacactgggcttccgttacaagatgaggtctgtgtatgctcacttccccatcaacgttgttatccaggagaatgggtctcttgttgaaatccgaaatttcttgggtgaaaaatatatccgcagggttcggatgagaccaggtgttgcttgttcagtatctcaagcccagaaagatgaattaatccttgaaggaaatgacattgagcttgtttcaaattcagcggctttgattcagcaagccacaacagttaaaaacaaggatatcaggaaatttttggatggtatctatgtctctgaaaaagga

SEQ ID NO: 386 - DNA, 439 bp, Homo sapiens
ccattgaagtttttcctcttcagaagtgttactaaaggggaaacagagcagttttctttgacttaaaattttaggactcatagactttgttccttcactaacagcagtgtccttcactaacagggagctggaatgaactgataaagcaaagcaagaaacaaaaagcaaggagccagagatgggccccaagggaaatgtaaggaaatggtagggacaaaaaaaaaggaaaagaaacaaattcacaagaaacaatcatctatctgtaatttagattctgaacaaccctcctcaccctctcaaaattcttaagtttcaacactgtaaaaatctcaaagagcatactagttaccatgaacctaacattcttccctaaaaaggcttccaaaaaagcactaggctattgtagtgattttgttagtgctgaggaccagctttcttt

SEQ ID NO: 387 - DNA, 554 bp, Homo sapiens
gttgtcatgaagcttcaaatagatctctatagcaattcttgctgccttgaagtaaaatggatgctgtcgaagtacatcttctagttttaataagtccacatatgatctaagggtaatcttcctcatacagtatgtatgaaagtcaaactggtcatcagtgatttctataaaatgtctctcaatctcatgacatttcttaagtgcttcaccaaatttattcattgctttataagcctgggcacattctgtttggaaccacatgcactgcatttcattcaaattctctaccgctgatgttccttcccttgtaaactttgagcacatttcttcagcttctttaatcaggttggcttttagcatgtattttgcacatttggagttgataaatctgtctgctgtgtccaaggcctgggcctcatccatccaccttgcagcttctttaatatttccagcatgcttatagattttagctttcacgagaaagagttctattaatgtaggtgtactttcaatagcagtatttatgtactccaaagcaatagatggctgaccaa

SEQ ID NO: 388 - DNA, 439 bp, Homo sapiens; identical to SEQ ID NO: 386

SEQ ID NO: 389 - DNA, 329 bp, Homo sapiens
cctgcaggggatgggaccttccagaagtgggcgtctgtggtggtgccttctggacaggagcagagatacacctgccatgtgcagcatgagggtctgcccaagcccctcaccctgagatgggagccgtcttcccagcccaccatccccatcgtgggcatcattgctggcctggttctctttggagctgtgatcgctggagctgtggtcgctgctgtgatgtggaggaggaagagctcagatagaaaaggagggagctactctcaggctgcaagcagtgacagtgcccagggctctgatatgtctctcacagcttgtaaagtgtgagacag

SEQ ID NO: 390 - DNA, 583 bp, Homo sapiens
  misc_feature 551: n = A,T,C or G
ccacggacccccagttccccttacgcctcacccttcgggacttcagcctcctggaatcccgcccctcgggggcagtgccggccttcttgcgctgtctagtgctctgagtgggcagtctcacttggcaataaaagatgacaagaagcaccacgatgcagagcaccacagaggtgagaggccgggcaagccagattaggactttgtcctcatactcttacagtgctgcaaagttgtgtgcatcgctaaagagagccccaacctatacagagagcaaacaatgagataagaggaactgtcgcaaagctttccactgaaacacaggtcaccctggaagtttgcagggtttgctgtgggcatctgtagatttctcgatctcgttagattgcaggcatcttgacatcttggcaactgcctagttaatgccagtggcctgtaccatattatggaaaactgttaactgcttaattgggtaattttcaaagaaagtaatgttgttaaatggggcgaaataagaagttaaatttgaaagtgaatgtgttcaaatgaaaggnttgataattgcatctgttactacttagtttca

SEQ ID NO: 391 - DNA, 216 bp, Homo sapiens
atgcaaacacctttacacgctagatggtggggacatcatcaacgccctgtgcttcagccctaaccgctactggctgtgtgctgccacaggccccagcatcaagatctgggatttagagggaaagatcattgtagatgaactgaagcaagaagttatcagtaccagcagcaaggcagaaccaccccagtgcacctccctggcctggtctgctgatgg

SEQ ID NO: 392 - DNA, 525 bp, Homo sapiens
aaaaaaagaaaagttaatttcagttattgtttctgtatttgtgaggactggagaaaagaaagataatgcataattaggaattttaattttgatcccccaaaagagtcctgttgaaatacagtaaaggacacagttcttctctccaggcagcttttccaaatacaaatttcacactttccaaataagggcttttcttgataggttactgattatgggtattaacaggagttgaaagaattgaagggttagtcaccaaaaagacagatcttagtcttaaatcatagcaattcttggctttataaactgtattgatacgttctcctataaactagtcccaatttccttcatgggccttcactgagttacttgtagcattctaatggaagaagagagtttaagagatttaagagacagcagtttggattttgctggaagtaaggattttgctgcttgagcacttgtctttttggagtaattccattttcttccatcaagttacataaactgtatctgtgctcctgatac

SEQ ID NO: 393 - DNA, 359 bp, Homo sapiens
gcgagatggtctagagtcagcttacatccctgagcaggaaagtttacccatgaagattggtgggattttttgtttgtttgttttgttttgtttgttgtttgttgtttgtttttttgccactaattttagtattcattctgcattgctagataaaagctgaagttactttatgtttgtcttttaatgcttcattcaatattgacatttgtagttgagcggggggtttggtttgctttggtttatattttttcagttgtttgtttttgcttgttatattaagcagaaatcctgcaatgaaaggtactatatttgctagactctagacaagatattgtacataaaagaatttttttgtcttt

SEQ ID NO: 394 - DNA, 339 bp, Homo sapiens
aaatcactggatttttgcccaccctctttccaaataagaaggcaggagctgcttgctgaggtgtaaagggtcttctgagccgcagtggcaattagaccagaagatccccgctcctgtctctaaagaggggaaagggcaaggatggtggaggctttctgtgctacctggaagctgaccaacagtcagaactttgatgagtacatgaaggctctaggcgtgggctttgccactaggcaggtgggaaatgtgaccaaaccaacggtaattatcagtcaagaaggagacaaagtggtcatcaggactctcagcacattcaagaacacggagattagtttccag

SEQ ID NO: 395 - DNA, 335 bp, Homo sapiens
ctgggagaagagtttgatgaaaccactgcagatgatagaaactgtaagtctgttgttagcctggatggagacaaacttgttcacatacagaaatgggatggcaaagaaacaaattttgtaagagaaattaaggatggcaaaatggttatgacccttacttttggtgatgtggttgctgttcgccactatgagaaggcataaaaatgttcctggtcggggcttggaagagctcttcagtttttctgtttcctcaagtctcagtgctatcctattacaacatggctgatcattaattagaaggttatccttggtgtggaggtggaaaatggtgattt

SEQ ID NO: 396 - DNA, 535 bp, Homo sapiens
  misc_feature 14, 24, 32, 206, 240, 361, 384, 439, 442: n = A,T,C or G
gtgcgatacgtgcnccatctgcanggtccagntgatggatgcctgtcttagatgtcaagctgaaaacaaacaagaggactgtgttgtggtctggggagaatgtaatcattccttccacaactgctgcatgtccctgtgggtgaaacagaacaatcgctgccctctctgccagcaggactgggtggtccaaagaatcggcaaatganagtggttagaaggcttcttagcgcagttgttcanagccctggtggatcttgtaatccagtgccctacaaaggctagaacactacaggggatgaattcttcaaataggagccgatggatctgtggtcctttgggactcatcaaagccttggtttancattttgtcagttttatcttcanaaattctctgcgattaagaagataatttattaaaggtggtccttcctacctctgnggngtgtgtcgcgcacacagcttaaaagtgctataaaaaaggaaagagctccaaattgaatcacctttataatttacccatttctatacaacaggc

SEQ ID NO: 397 - DNA, 431 bp, Homo sapiens
  misc_feature 381: n = A,T,C or G
tgactgcatttaacataagctaagttacattacactttcaaatgcagtatagaattaacactgcatatctaaatggctcatatataaaatgtgtaattaaaacccaaacatacacactatgtttattacattcccctacattgaaagtactgagaacaatttaactctgaacacaaaagtttagtgaatttgctactgttccattacaggacaattaaaaatgagactatatcaacttcactagaatttaattgctaaagctaccttatgcacatctattaaactaaaagaaacgactttaaccccttcagttgtttttaaaacagcactcctttacagggagtcaggtttggtaaatataaaggatacataaaaaatacngtataaactgcataagcttaacagtagcaaaaacactgatgaacttttac

SEQ ID NO: 398 - DNA, 499 bp, Homo sapiens
aaagggaaataaaccaatcatcttctgaaagtcaaacagtatttgctatgttgtaatcccgttcaccattaggctgcaactggaccacgacatcatgttcattaatttcattttctgcatcactactgtcagtatcttcattgtcgtcttcctcatagtctgaagattctgtcacgttctgatgtgagcgggattccgataaagccccaaatgactgggcactgacagaagctaaaggtctcagtaaaggggtatgttctgtcacttcattttcttcttgactactgtctgtgtcagagtctgaatcgccttgagaaggaacaactttttgcttgcacactggacaggtttttttggttttagttagccaagggtctacacacttgcaatgataagcatgggaacagggaaggattctgagtttgtctccatcttcatactcatccaaacaaatggcacatacatcatactcatctcctgaaaacagaaaatatgtaga

SEQ ID NO: 399 - DNA, 306 bp, Homo sapiens
  misc_feature 136, 174, 225, 267, 279, 297, 303: n = A,T,C or G
cctggtccctcaacccctgtagaaccccaagcaggccgatgtgggaggcatcaccacacgtgatctgaataaagtgtaacaattgtgtagcctttttgtataaaatagacaaatagaaaatggtccaattagtttnctttttaatatgcttaaaataagcaggtggatctattncatgtttttgatcaaaaactatttgggatatgtatgggtagggtaaatcantaagaggtgttatttggaaccttgttttggacagtttaccanttgccttttatnccaaagttgttgtaaccngctgtnata

SEQ ID NO: 400 - DNA, 327 bp, Homo sapiens
ctgaaaagaacagtgttttaccgggggagagacttgttaggaatggggtcttctggtcccattcgagcatgctgcccttgggaagctcattgcccgatgaacttttgtttgctgacgactcctcagaaggctcagaagtcctgatgtgaggagaggtgcggggagacattccaaaaatcaagccaattcttctgctgtaggagaatccaattgtacctgatgtttttggtatttgtcttccttaccaagtgaactccatggccccaaagcaccagatgaatgttgttaagtaagctgtcattaaaaatacataatatatatttattt

SEQ ID NO: 401 - DNA, 316 bp, Homo sapiens
  misc_feature 5, 51, 68, 173, 217: n = A,T,C or G
gcctncacacatgatcctgaccgtcggaaacaaggcagatggagtcctggnggaaacagatggaaggnactcttcgatggcggccagtttcaggtccagtgagcatgagaatgcctatgagaatgtgcccgaggaggaaggcaaggtccgcagcaccccgatgtaaccttctntgtggctccaaccccaagactcccaggcacatgggatggatgtncagtgctaccacccaagccccctccttctttgtgtggaatctgcaatagtgggctgactccctccagccccatgccggccctacccgcccttgaagtat

SEQ ID NO: 402 - DNA, 423 bp, Homo sapiens
gaggagcggctggtggagtggatcatagtgcagtgtggccctgatgtgggccgcccagaccgtgggcgcttgggcttccaggtctggctgaagaatggcgtgattctgagcaagctggtgaacagcctgtaccctgatggctccaagccggtgaaggtgcccgagaacccaccctccatggtcttcaagcagatggagcaggtggctcagttcctgaaggcggctgaggactatggggtcatcaagactgacatgttccagactgttgacctctttgaaggcaaagacatggcagcagtgcagaggaccctgatggctttgggcagcttggcagtgaccaagaatgatgggcactaccgtggagatcccaactggtttatgaagaaagcgcaggagcataagagggaattcacagagagccag

SEQ ID NO: 403 - DNA, 278 bp, Homo sapiens
  misc_feature 37, 71, 122, 265: n = A,T,C or G
cctcaccctcctctgcctcagattcccaagtgggcangtgggggtgaatggggctccgggtagcacctcanctcctctcagctcccctcagcctgttctccttccagacccagagagctganaagagtagctgtgaggctcagggcagaggctctctgcctttcaggaacagccctaaccctgctccccttgcttggcctcaggaaggtgccgcgagctctcctgccgtccctgggccgccctggctctgctgtgtccagatggncaggctactgcca

SEQ ID NO: 404 - DNA, 228 bp, Homo sapiens
aaaatatataggatattgaaacattcagttagtatgcttctttaattttttttctccctgaaattataggaaccagatgttaaaaaattagaagaccaacttcaaggcggtcaattagaagaggtgattcttcaggctgaacatgaactaaatctggcaagaaaaatgagggaatggaaactatgggagccattagtggaagagcctcctgccgatcagtggaaatgg

SEQ ID NO: 405 - DNA, 204 bp, Homo sapiens
ccagggcctttgcaaacaagccaggccaaaaaggctcaacatttacaccggctgctttaatgagggcattgatcttatcctccgtgactgtcacctcatcgtcgtgcagaatgagggccgagtagatgcaggcgagctcggagacagaggccatggcgcgggcgagtgtagggctggcgctgccggacgcggtgctagtcgccg

SEQ ID NO: 406 - DNA, 301 bp, Homo sapiens
aacgcctcagtacctcggcgggaccgccatggttctgctgcacgtgaagcggggcgacgagagccagttcctgctgcaggcgcctgggagtaccgagctggaggagctcacggtgcaggtggcccgggtctataatgggcggctcaaggtgcagcgcctctgctcagaaatggaagaattagccgaacatggcatatttctccctcctaatatgcaaggactgaccgatgatcagattgaagaattgaaattgaaggatgaatggggtgaaaaatgcgtacccagcggaggtgcagtgttt

SEQ ID NO: 407 - DNA, 437 bp, Homo sapiens
  misc_feature 143, 150: n = A,T,C or G
atcaaaaccaagagggcatcacaaaataaactttggtgaaaaatatcttcatcaaagaagaaaatatgagaagagtagtccttatgcagtgaggagaaatatatttggtaaagtaaatatgggtagtagatactgaatctatngatagcntatattccaaatgttttttagggaatatcaaatcagatgatgcttagatgttatagtaatatcacttatctcatttggaatgaaatttaatgttttttaataaatagcaaattttcattttttcactacctttataaaacaaattaaatatttagagtataactgatcataactaacatcaccttgcatttactaataaatactctaaatacatttggtttattattggaatttatatccttataattttacctgctagaaattagtgaccttgtggcattatgttt

SEQ ID NO: 408 - DNA, 444 bp, Homo sapiens
ctggcaacaaacctgaccacatgattaagcctgttgaagtcactgagtcagcataaataaagactgcacaggagaattacccctatacctgagcctcaaccttctgggggaaagggaactagataacatacttcttacttgtctgtacagtaccttgttgcagatgggtgatatataatggtaatagaatagcacagccagacttgcttcctgcatggtagggagagacacaaaagatgggaaactgcttttccacaaggaatctccgtagaattttgcggcgaccagatggtgcataggtctggaaggtctgatctcccttggtcttccatgggatggttagtgtggaggggagatatagattgtccggccgctttgtgattccatggattgattcagtcttctggatttttttttctttatattttgggtactggagctttt

SEQ ID NO: 409 - DNA, 490 bp, Homo sapiens
gaaatggagagttactgtttaatggatatagttttgatttagcaagatgaaaaaggtcccaagattggacgttctagagattgtaggggactgtatggttgtagaacaatgggaatgcacttaactgccacagaaatgtacagttaaaaatgattaaagtggggccttgtgcggtggttcacacctcctacactttgggaggccaaggcaggcatgtcacttgaggtcaggagtttgagaccacctcggacaacatggtgaaaccttgtctctactaaaataaaaaattagctgagtgtaggccaggtgcggtggctcacgcctgtaatcccagcactttcagaggctgaggcacgtggatcacctgaggtcgggagttcgagaccagcctgaccaacatggagaaacaccgtctctactaaaaatacaaaattagccgggcgtggtggcacatgcctataatcccagctactagggaggctgaggcagg

SEQ ID NO: 410 - DNA, 493 bp, Homo sapiens
  misc_feature 23, 437: n = A,T,C or G
ccaggtatgtctgttccatttgngatcaaggaaacttcagaaaacatgaccatgtacggcatatgatttctcatttatctgctggtgagactatatgccaggtctgctttcagatattcccaaataatgaacagttggagcaacacatggatgttcatctgtatacatgtggaatatgtggagcaaaatttaatttgaggaaagatatgagatcacattataatgccaagcatttgaaaagaacctgagtgattttctactgtactaatgtttagatgatagcagataaaacaccaaagcaaaggatatgagctatttaggaattgattatataagatgatttgttagaaacaaatttcaaggcccttttaactttaatatttttgtttaggattttaagtatctacatttaggtattaaatgtttatcatttttgntggttcttaatagaattatttggttttagtttttcttagctatgattaaaattttt

SEQ ID NO: 411 - DNA, 346 bp, Homo sapiens
aaaggagccagaagcaccggtgcctttcgtttgcaccagagtgcccttgctcaccaggctcttgagaccaagtttgatacggctgttgtttttctccacatcatagccggcggcagccaacgcttttttcagagcagccagagaaactccgctacgctctttagagacggccacagccttggtgatgagctctgacaccgggggaccggacgccttacgaggcgtacccccagcctttttggccgccttcttctttacaggggccttctccgcaggaggcgcggcagcgggagcggcaggagcagtctcggacatgttgagaatcaaaaactcgggtacaagtggc

SEQ ID NO: 412 - DNA, 354 bp, Homo sapiens
ctgtagagtatatgaccaggtggaaagtccaacagatgccccactcacaagatagggccctccaatcagtcttctggctccctttcactcatagtaactggttgctcttcctattggtcatagataaatgacacctgcacaattctccgagtgctttcaagcaacttcgggaggcagtgactaagaccctttccttgctcccagcttcctatgtcccagggctgcctgtggcacctggactgctgctgcccctgggtcccgtacattccagggcaacaatggaggaagggcaggcaacgcatgaggaattaacagtctttattgggctcagaccaggagtccgtgggtcttgag

SEQ ID NO: 413 - DNA, 556 bp, Homo sapiens
gttatttaaaacagttttctgcagtctataaacatttctcaacatttttttaaaagtcttagttaaaatgtaaatctgatatacagtagtgtttctcaaagtatagttcatgaactccttgcatcataattacctagatgcctcttaaaaatgaagatttcagagacccattctaaacaagggcattcactctctggaagtagcatggccttgtgaacttaaatttggttttgttttttcttttttgctgttagaataatttcagacccaataaggaatttcgattattaaagttgagaaatttcacaaaactgcccggcacacaagcacacacatacatagacacattttaggtgataatctcttgatattagaagttgcatttgttaaatacatgctgtattttttatgagttgacttaatagtttatgtatattgactttgctttgtaggaagtaaatcaccagatatcttattgtttcatttaggaaagtagtgatatagatgaagagccaacttgatgaatgtgctattcataagctagaaactacagttt

SEQ ID NO: 414 - DNA, 232 bp, Homo sapiens
ctaaagcctaagtccttttcacttttcctccatctgaaggtaggtgagttcatcctcttcatagtaatgctgttttaccaagactttatagcagatggacccagaaagaattttctgctattgtgttcactacaacaggatagggacatcagacagccccagaaaccccttccagatctgatatgggactattaatttttatgctgttaattggtattcattcacaatgcag

SEQ ID NO: 415 - DNA, 250 bp, Homo sapiens
  misc_feature 139, 156, 174: n = A,T,C or G
gtttttaagctgtgactaaactttgaaacattgccctgcaccacagatcctaaatcaagtactgcaaatattaaatgggacaagtgtaaagcatgcaaaagttagagatctgttatataacatttgttttgtgatttgnactcctaggaaaaatangatttcataaatgtaaantgcacagaaatgcatgcaatacttataagacttaaaaattgtgtttacagatggtttatttgtgcatatttttact

SEQ ID NO: 416 - DNA, 566 bp, Homo sapiens
  misc_feature 109, 114, 214, 490, 497: n = A,T,C or G
ccaagacagcctgtttcagagggttgttttgtttggggtgtgggtgttatcaagtgaattagtcacttgaaagatgggcgtcagacttgcatacgcagcagatcagcanccttngctgccccttagcaacttaggtggttgatttgaaactgtgaaggtgtgattttttcaggagctggaagtcttagaaaagccttgtaaatgcctatattgngggcttttaacgtatttaagggaccacttaagacgagattagatgggctcttctggatttgttcctcatttgtcacaggtgtcttgtgattgaaaatcatgagcgaagtgaaattgcattgaatttcaagggaatttagtatgtaaatcgtgccttagaaacacatctgttgtcttttctgtgtttggtcgatattaataatggcaaaatttttgcctatctagtatcttcaaattgtagtctttgtaacaaccaaataaccttttgtggtcactngtaaaantaatatttggtagacagaatccatgtacctttgctaaggttagaatgaataatttattgtatttttaat

SEQ ID NO: 417 - DNA, 392 bp, Homo sapiens
gtcttgtttctagcttaaacaatttttttttttgcacaaaatttcatttttaataaaagtggtatcttttgactgagttattgttttgaaaatggtatataggtttccagtaggtcaacaaccatatgtaaatggtttttataaatttctcaatttggggacaagatttttttgtggtctaaattgtgggcttaagattcttttctttatatgtgtacatataatttttttttctttgccacactggagcacaatgtttctatgtaaagaattattttcattctttatccatgagcaccaggctttgctcacttaaaaaaaaattaagccacattaaggagtgagtcttcttttttacaataatgtaaaaattaaactgtttacattttttt

SEQ ID NO: 418 - DNA, 335 bp, Homo sapiens
aaaacaagggcatgaaaaagacttcagattaagactcatactctgttctaaatgaaaagtagtaaaactacttctagtagaaaatacctgctatggaaaaaaaatttcagatattttccatttgatgtaggtattaataaaaaatatgatgtttatatctaaaatataaactagcaatttattttcatttataatataaagtgttttaggaaaagtttactcttctcagtgttcaaaataaaataggaattgttctccatacctagcaattttaatgataatgtcaagtaaaaatttaattctgctgaactaaagctcaaatagattcaaatttt

SEQ ID NO: 419 - DNA, 450 bp, Homo sapiens
cacaaaatgtagggttataataatgttaacatggacatgatcttctttataattctactttgagtgctgtctccatgtttgatgtatctgagcaggttgctccacaggtagctctaggagggctggcaacttagaggtggggagcagagaattctcttatccaacatcaacatcttggtcagatttgaactcttcaatctcttgcactcaaagcttgttaagatagttaagcgtgcataagttaacttccaatttacatactctgcttagaatttgggggaaaatttagaaatataattgacaggattattggaaatttgttataatgaacgaaacattttgtcatataagattcatatttacttcttatacatttgataaagtaaggcatggttgtggttaatctggtttatttttgttccacaagttaaataaatcataaaactcaaa

SEQ ID NO: 420 - DNA, 341 bp, Homo sapiens
  misc_feature 134, 156, 167, 231, 264, 310: n = A,T,C or G
ccttgcactgcggccaccacgctccccgctgccaccatggagggcggattggaaatgaacttcacatctgtggcacagagggcaacgaaggtctgcgcgtgtttgtggatgatctgtttgttctcctccgcctntggcattttggagaggaagtgntcaatgaaatngtgcggggtcattgcggccaggttccacttgagcttgttcaccaggagcagctccatttgcagnagctcctcgggccggatggagttgtcggtgtanatgcacagcttctcggccgtcagggggatggtctccttcatcttanaggccacgaacatgcaagtggcccccagcag

SEQ ID NO: 421 - DNA, 460 bp, Homo sapiens
  misc_feature 339, 364, 401, 452: n = A,T,C or G
aaaaaataaacttgagtcttgaatgtgagccactttcctatataccacacctccctgtccacttttcagaaaaaccatgtcttttatgctataatcattccaaattttgccagtgttaagttacaaatgtggtgtcattccatgttcagcagagtattttaattatattttctcgggattattgctcttctgtctataaattttgaatgatactgtgccttaattggttttcatagtttaagtgtgtatcattatcaaagttgattaatttggcttcatagtataatgagagcagggctattgtagttcccagattcaatccaccgaagtgttcactgncatctgttagggaatttttggttgncctgtctttgcctggatccatagcgagagtgctctgnattttttttaagataatttgtatttttgcacactgagatataataaaaggngtttatca

SEQ ID NO: 422 - DNA, 422 bp, Homo sapiens
aaagttttatttcagttttataaaatactcctgctttgaaaggcaaagtgaatgtaaaaatgtgaatgtaattaaacaagtcactggcctggaaactttttattgcaatagtctttatgttttactactatattcacttcttggaatgaatttgcttgtaggtttgaaacaaaatatttgccttttgtcttgaaaaattcccttaaaaaattaattatttttggaactgtacaactacattttcattcgatgttaaatatgcaacttggtccttggatatcatgttacaaagtccaacctgttggataacttgttatagaaaacaataaaaaaccttaaactatcataaaatattactgatgttaacagtcatgtatgtataacacatcactgtatctagattttcctgttattggatgttt

SEQ ID NO: 423 - DNA, 375 bp, Homo sapiens
aaattccaatttatttgttaatcagtaaaatgtaataggtgatagtgtgtccagagaatgagcctcctatgtgtaggaagacgatagtcttattacacctgctatcaattaggtcatttacatagctgctaatgtatcagaatttttttccacactgatgtagtactttattcaagtcaaaacaagttatcattatcataccaacgttgaagaattaaccattcctgaaacaagaaacaatctttacattagtatttcttggttatggtgcttagtcttggtattattaagcacaatgattcttaataaacatgggtggatgaaggcaaatgcatatagcctagtcccctcaataatttattctccatcttattt

SEQ ID NO: 424 - DNA, 527 bp, Homo sapiens
  misc_feature 520: n = A,T,C or G
aaattttgtagccattcttatgatgctcttgatttgttggttacacaaatcaattttattaaaaatccaaagataagtctttaggtatattttgtaccaaattaaattagaagacaaaaattgtgctttcatagttgctacaaaggtaaataatggagagatttggtacaaaacaacaaaatatatatatattctcatatatatatatatagctgataaaattacctgaggagtgtaatgcttatttttttgtgtatatctttgcaatctattttatatatattgacaaaagagactgtgaaatacttagccatacagaatatgtgaccagaccagagcatgtgtaggaagactttacagtaatcattaactctaccccgaaatgatggactacaagttataatgtgtgttacctacacttcaatcagtaatattagcaaatctccaaatgttagtcacattggtttgtctcccttgtacattctttattcatgatattacagtgctgtaactgggtggnccttttt

SEQ ID NO: 425 - DNA, 393 bp, Homo sapiens
aaaatagagttaaagggaagtgatgtacatttcgggggcattagggtagggagatgaatcaaaaaatacccctagtaatgctttatattttaatactgcaaaagctttacaaatggaaaccatgcaattacctgccttagttcttttgtcataaaaacaatcacttggttggttgtattgtagctattacttatacagcaacatttcttcaattagcagtctagacattttataaacagaaatcttggaccaattgataatatttctgactgtattaatattttagtgctataaaatactatgtgaatctcttaaaaatctgacattttacagtctgtattagacatactgtttttataatgttttacttctgccttaagatttaggtttttt

SEQ ID NO: 426 - DNA, 283 bp, Homo sapiens
  misc_feature 135: n = A,T,C or G
ccatggcgggcacggggcgtaggagctggctggcggccggctctgcatgttcttgttgcctgtcgtctgtaactctagtgttcgacattcgccgtgatacagtggtgtcacgacgtgtgtaactgtggtcagcanaccttgttccgcgtggacgcctcaagtggattaatttctggaagcctcaatctgtatgtttgagtatttacatgagaatgttatttgaatggaattttcttaacccagaaggtagtatttataatcatttacttgtagcgaactgttt

SEQ ID NO: 427 - DNA, 164 bp, Homo sapiens
  misc_feature 33, 39, 42, 61, 97, 104, 120, 148: n = A,T,C or G
tttttttttttttttttttttttttttatgggngttcancantttatttacaaagtgggcncaggggcgtcaggggctggtggacccaggccgcttnttctttntccgtctcgtttgganagctccttggggctgctccaaacccganagcttccgcttggcaa

SEQ ID NO: 428 - DNA, 479 bp, Homo sapiens
  misc_feature 141, 170, 323, 326, 364, 371, 375, 377, 396, 411, 415, 421,437, 447, 456, 468, 478: n = A,T,C or G
aaaatatcctactatagtctaattagtagcttcaagaacaagtaaccattttttactgctcttttgaatgatgattagaaattcaaacaaagtattttaaggttcaaaaacttttttttttttttttttttttttttaganacagtgtctcactctgtctcccaggctanagtacagtgtgcaatcatagctcactgcagccttgaactcctggcctcaagcaatcctcccaccttggcttcccaatgtgctaggtttacaggcgtgaaaacattgtgttgtgtgtgtgtgtgtttttttttttttttttaaacagagtttcnctnttgttgtccaggctggagtacaatggcttgatcttggntcactgnaatntntgcctcgcaggttcaagcnattttcctgcctcancctntggagnggctgggattacaggngcccaccatnacgcccggncaattttttgtntttttagtana

SEQ ID NO: 429 - DNA, 306 bp, Homo sapiens
atgagaaacgatctgtactgggatttcccagcagaagagactttggtttttgtcatcctgaagttgccactccaccaccagttttatagagggatattcgcttttcactggtagtttattcaggtagctataggtcttgtctttttggatagggcagttaattccactcttacaaccatcaggctcaggaatgggaaagggaactgggacgcccatcaggatgccatgcaccacagccttgctgcttttagactgaatattgctggtgaaggtgacattgacgctgtaagactgtcctttgctcag

SEQ ID NO: 430 - DNA, 490 bp, Homo sapiens
cctcacaatgcacgtgggagatgaagtcaactggtatctgatgggaatgggcaatgaaatagacttacacactgtacattttcacggccatagcttccaatacaagcacaggggagtttatagttctgatgtctttgacattttccctggaacataccaaaccctagaaatgtttccaagaacacctggaatttggttactccactgccatgtgaccgaccacattcatgctggaatggaaaccacttacaccgttctacaaaatgaagacaccaaatctggctgaatgaaataaattggtgataagtggaaaaaagagaaaaaccaatgattcataacaatgtatgtgaaagtgtaaaatagaatgttactttggaatgactataaacattaaaagaagactggaagcatacaactttgtacatttgtgggggaaaactattaattttttgcaaatggaaagatcaacagactatataatgatacatga

SEQ ID NO: 431 - DNA, 284 bp, Homo sapiens
aaaaaagaaaaaaaagaaagaaagaaaagcagaaagtggacatcgaccagcacctgtgtacgtacagtacaccttgcagccgaatgcaaggttacttcatcctatggtaaaggtcgcccccagcccggtagccagagatgccactctttctgcccagctaacaccattgtgcgcctgtgtgcgagtggtgccagcataacctcaatcacaccaatattgctgccaccactgctttactggctccgactgaacacagcatagaagagtcaggagagaatgcacag

SEQ ID NO: 432 - DNA, 414 bp, Homo sapiens
  misc_feature 271, 272: n = A,T,C or G
aaaggaaacaagttataaagacattattaatatttatttaagcatgctctcaaaatggtaacatttcctttaataattcttggggtgtcctctagaggtgacctgtctcataaaaaggctatggtcccttggatttgctggcagaagaggtactgcatatgcgagagcatttaccgaacatataaataaacacttctgaagtctatagcaaaactaaaagttaccagtgttctgaagatttcctcaacttctcttttgatacaaatgtcannaatctaaaatgacaattcatgttcagaagagatataaaatataagaaacctgtgaaaagccatcatctcaaggtcaagagttatctgaatcactgacatcgagcaaaggaaatttacaccataaaaagtatgaacagttttt

SEQ ID NO: 433 - DNA, 512 bp, Homo sapiens
atctactgcccccctgagactgccgtgctcttggggtcctacgctgtgcaggccaagtttggggactacaacaaagaagtgcacaagtctgggtacctcagctctgagcggctgatccctcaaagagtgatggaccagcacaaacttaccagggaccagtgggaggaccggatccaggtgtggcatgcggaacaccgtgggatgctcaaagataatgctatgttggaatacctgaagattgctcaggacctggaaatgtatggaatcaactatttcgagataaaaacaagaaaggaacagacctttggcttggagttgatgcccttggactgaatatttatgagaaagatgataagttaaccccaaagattggctttccttggagtgaaatcaggaacatctctttcaatgacaaaaagtttgtcattaaacccatcgacaagaaggcacctgactttgtgttttatgccccacgtctgagaatcaacaagcggatcctgcagctctgcatg

SEQ ID NO: 434 - DNA, 511 bp, Homo sapiens
aaaatgtggcaattgggaagtacagtacatgcttccctgtggcttgggggtgtgtagttggggccctaattcttgagccagtcaagagacacttgggatttagccctcaattgcagcactgaggcactggtgccgagaaacaatcctgagggggtccccaacccacctagtcactccttagtttgcagaggcactatctgcagagtcctgtgaaaggctgcagtgaagtcttgcatgagactccccatccagcggagttctccaagctgcagggtagagcgttgtgccaggagggtgtttgggctcatgaaacagtggagagacgcagaggctcactgggaaaccttggcctcaccgggcctggattgggcatcggcagtgggcatgaagtgggggtgggattctttaggccagggtccaggacacttgggggatcgtaatgctgggggttttcggggaggaaccaagggctcacggagcctcctgtgctgcagtggctgggccataggtg

SEQ ID NO: 435 - DNA, 559 bp, Homo sapiens
aaagttctttcatcaagagtttaggtgcccccattgccctcataagctggttgcaaattatttgactcttacttgtaaaaaaaatccttaattctttttgtgtgtgagacacgtgttcattaaaaagtacatataagcaaaaagaacaaaaagaagaaaacaaataaaatttcacaccacacagaaataagcttggttaagtttgtgatatatgttatatggatgtatgtatacacacacgcacacacacaaagtttggaattttatcctacatatgtgagctgatattaaatatgctgctttgccataacctgttatgttttactttacaacatggaatgaacatattcccatgcaaatgtgtgaaagtttccaattgaaaaatagacctggaaaatgggtcaaaatccaaaatccaatgagatgctggtaccaaggaaattacctaaaacaaaatttcatcagatgattaaaagtaaaatggaggtcaaagatacatcagaaaatgctaacagaaagaaagctggggccagattttaatattaggcaaaaatgaatt

SEQ ID NO: 436 - DNA, 348 bp, Homo sapiens
cctccaaggtgatgggcggcaggtaacgagtcattgcctctcacgccacctggaaggctggactacttcctcctcccaactgcggggtcccagaaatcctcgggtcccagtggctgacttacaatattcaattcactctgaccaaacttcctatgagaaaatccacggtgagccaaaatgaaaagtacaaggcagtagtacaggaacctggcagccgcactggccgcccagaaacgtcagtggtgctgtcccattcggcgaaaggttagggagcaggaaaagaggaagcaggagagggaaggaaagtcccatggaatatgtattccagaatccttacattttctcagc

SEQ ID NO: 437 - DNA, 393 bp, Homo sapiens; identical to SEQ ID NO: 425

SEQ ID NO: 438 - DNA, 344 bp, Homo sapiens
aaaaaaattaaaggcttatgcttcacataaattcatgtcgattttccaggcattatttggttataacgtctgaggcattgcatggatttactggtacctaaagtgtggatttattcttaagaagcatgcagctctacaatcttgtacagtgaaacgttgggcactcacaaagttatgcaagacaggttatgatgtgggcttaagaaaggtgttgagagctaggagtagagatatagaagaaaaaaagtgtaatattttcaagaaagagtaattagtttgtaagtggaggctactttcattgtttttttttttttaattttgatgttttagtgttatgttttttg

SEQ ID NO: 439 - DNA, 509 bp, Homo sapiens
ttggcacatctggacggagccgccacagccgagggtgaacaatgactcctggcaagcatccaaattgcttgcagacgctagcaggtctcatctacaaccgcccctaccagcatctctctctctctctcttttttatgagaatcagattttcattgctccattcaattgctctcctctgccattttttacagctcttatcgttcccctggaatatggccttgagacagctcatccgtgtccttcactgtgttatctcttctaacttttattaaaacttcagctttcatctgaagatagctaattaaatctggaacagattatatgcctccccttaaaaagagcacaaaactattttcttcaaccccagcaatgctttttttcctttccaaaaggtaaaatcaaaggtgtttaagaagtctctttatttacagagctaagatattcaacacgtcatatatgagttgatttatattaaagttgtctgtgatatgaaaaaaaaaaaaaaaaaa

SEQ ID NO: 440 - DNA, 442 bp, Homo sapiens
  misc_feature 231, 232, 318: n = A,T,C or G
aaaaaaccagttataacagtgtttaatttagataagtttgagggaaaataatcagtaggcaagaggaacatttttcctgtagtagctagagtgccttgaaaaaatgtgttggctatgtgaaggaatatttcaactaaaatggaatggtatgcttttcacccttaaagtttgaggaggatcttgatatgttttaacattatcatggcagggaaatatataaagaagaaaaanntttttacattaaaccttttctaaaaattgtaaatagaaaaataatttggttttttatcaagaacaacacttatcgttatgtattgngttagttatattgccagtctgttgcgactgactcaaaaagttaaatgttgccactgctgaagatgattatgagcatcgcaaactttgtttctgacccattttgacagtttttatatactccttt

SEQ ID NO: 441 - DNA, 354 bp, Homo sapiens
ctgctcttgtccacggtgagcttgctatagaggaagaaggagccgtcggagtccagcacgggaggcgtggtcttgtagttgttctccggctgcccattgctctcccactccacggcgatgtcgctgggatagaagcctttgaccaggcaggtcaggctgacctggttcttggtcatctcctcccgggatgggggcagggtgtacacctgtggttctcggggctgccctttggctttggagatggttttctcgatgggggctgggagggctttgttggagaccttgcacttgtactccttgccattcagccagtcctggtgcaggacggtgaggacgctgaccacacggtacgtg

SEQ ID NO: 442 - DNA, 228 bp, Homo sapiens
aaaatttcttagaaaacaatggaatgagaatttaagcctcaaatttgaacatgtggcttgaattaagaagaaaattatggcatatattaaaagcaggcttctatgaaagactcaaaaagctgcctgggaggcagatggaacttgagcctgtcaagaggcaaaggaatccatgtagtagatatcctctgcttaaaaactcactacggaggagaattaagtcctactttt

SEQ ID NO: 443 - DNA, 507 bp, Homo sapiens
tggctctgttgattgcaactccttgtatagcttgtattttgatttagtttatattctgcttattatgtatactgtgttcttatatatgagaaagcacaaatgcgaaagaggtcatgtcttctcaaaatctagcaaaggaagtagtctgcattggtgtgcattacagtattttgcttaatgaaagcctcagttctgaatgttgatatgagtagttaaaaggaagtggggccattttatgtgtttatctgtgtcaagtatttctggtaataagaagcacttaatttacacatattttaatcctgtgaaagattccacatagagaaaagaaagatacctaaccttcaacaaatgttatttttggaaacacaatttttgtcattaaatgttatattatttcacatatataaaacagatgttatgtaagaatgttgtatattttaacataaatcatttagagaaattatctagattcattaattttcatagtgcctttttcacatgagtcag

SEQ ID NO: 444 - DNA, 487 bp, Homo sapiens
ctgaataaagcccttccttctacagctccgtgtctgagaggttttgtctgtggcttgtcctgctacagtccttggttccctgaccaggaagcgaggtgactgacaagccctgtggagccccgtggagcgtccctgcagaggactccggccagcctgagtgacgcaatccaaagagcgctcccgggtaggaaatggccccggtggaacgccttgccagagcagcgcatagcaggctcccgagaaggattaacactggctgaacaccgggaaggaactggcacttgaagtccagacatctgaagcttgtcaagactagtctttggaacttgccccactccatgtgagtggaagcatggcctgatcacccacggtgtgcctgtattgacatctttgttctggttttgacttggcttgacttggtaagactagtctttggaacttgccccactccacgtgagtggaagcgtggcctgatcacccacggtgt

SEQ ID NO: 445 - DNA, 205 bp, Homo sapiens
  misc_feature 38, 42, 49, 76, 82, 91, 193: n = A,T,C or G
acaagcttttttttttttttttttttttttttttccgngtangattttnattcaaatttgatttacattccaaaanaaattntaaaatgtnttcacttgtttataaaaaaaagggggggggggggacaaaactttaattcaaattataaaacatgataaattttcaaattaaaattgggcaagttgcttggantaacaagttttt

SEQ ID NO: 446 - DNA, 373 bp, Homo sapiens
  misc_feature 290, 355, 361, 364: n = A,T,C or G
aaagagcaaacgttttttaagtgtattctagttgcaaagtatgcacacatatcttgaatggctttatttttattgtgtaaaactgttgaacacatgactgtgatgcacaaattctttacgtgtaaggagtctatgcattttacagtaacttattttatgatcgggtgatgagacagttatactttcaactgccattatttttattaagtgctttcattttctttacagttattataaaattgtatttattttatacagatgggttttcattttcctgatgctgtaatgtntacttcagcttgttgacctttctttgtgttatctgcatgttgtaacgtgtgataagaatgaatgnaaaggntgnggcaactgt

SEQ ID NO: 447 - DNA, 173 bp, Homo sapiens
aaaccccggtcatccggacatcccaacgcatgctcctggagctcacagccttctgtggtgtcatttctgaaacaagggcgtggatccctcaaccaagaagaatgtttatgtcttcaagtgacctgtactgcttggggactattggagaaaataaggtggagtcctacttgttt

SEQ ID NO: 448 - DNA, 466 bp, Homo sapiens
ctgcttccattggtgggtcatttttgctgtcaccagcaacgttgccacgacgaacatccttgacagacacattcttgacattgaagcccacattgtccccaggaagagcttcactcaaagcttcatggtgcatttcgacagattttacttccgttgtaacgttgactggagcaaaggtgaccaccataccgggtttgagaacaccagtctccactcggccaacaggaacagtaccaataccaccaattttgtagacatcctggagaggcaggcgcaagggcttgtcagttggacgagttggtggtaggatgcagtccagagcctcaagcagcgtggttccactggcattgccatccttacgggtgactttccatcccttgaaccaaggcatgttagcacttggctccagcatgttgtcaccattccaaccagaaattggcacaaatgctactgtgtcggggttgta

SEQ ID NO: 449 - DNA, 510 bp, Homo sapiens
ctggctggccgtctgcctgagcccatggatgctttctcaatcctaggctggttactgtgtaagcgttttggagtacggggccttgagcgggtgggagctgtgtgttgaagtacagagggaggttggggtgggtcagagccgagttaagagattttctttgttgctggaccccttcttgaaggtagacgtcccccacccggagagacgtcgcgctgtggcctgaagtggcgcaagcttgctttgtaaatatctgtggtcccgatgtagtgcccagaacgtttgtgcgaggcagctctgcgcccgggctccagcccgagcctcgccgggtcgcgtcttcggagtgcttgtgacagtccttgcccagtatctagtccccgtcgccccgggcaggtagagggagctaggcaaagctgaagaccgcagtgagtcaaattagttctttgactttgatgtacattaatgttgggatatggaatgaagacttaagagcaggagaagatggggaggggg

SEQ ID NO: 450 - DNA, 498 bp, Homo sapiens
aaatgcagattttacaacctcaacttgtccctttacaacaggtcttcccagagcttttaatgtgcagacaggcatgtgaacctctgataaagagagggaaaatggagaggcatcttcctctgacttaatacaaccctttttacttttggtagaaaatcataaggcatgagtgtttaaggagcacactttgggaaatgtggttctactagccttactaggcaaatatgcttctaatatgtataactaacacatgtaaagcactaattatattaataatgccatgagtccttttttctttttctgtctacttctatgatagtttaataccatgctttcttttattatcactaaaaagatggacatgttgaattattttataattttcttttacagttctgtgagttaagctgtatatagcatatgggtgtatcattctttagtaaattacatctacttgtgaactaaacattgatttcattttgactttgtgccattgtc

SEQ ID NO: 451 - DNA, 233 bp, Homo sapiens
cggccgaggtccagatggagttcactggagaatgaggcaatcaacaaaaaagacaaatgatgccaactggagagagctcgtgtcttctccatgttggaaggacattacaaaatggcaactgtggtgggggcagagatgaagtaagacaaccttacagtcggagtaagatgtgaatacctctacctatacagagacaaaaacacacacatgcagagccatacacacacccaaac

SEQ ID NO: 452 - DNA, 515 bp, Homo sapiens
  misc_feature 508: n = A,T,C or G
ctgaaggatgcctctgttggccctggaggagagggcacctgggtggttgggatagggatcccgaagtgtggttcctggacagggagcagggagcagaatagagcagggacagacctggcccgtgcccgggcttcgttgtagaaggctgtgatgatccgatccttttcatccatgaagttaaggtgcatctgcttcaccttcctgaaggcaatgtagtgcaggcccatgcccgccagcatgaggaggaggcagtaccccagcacttgtttgttttgtttgtgttgctgctgcctcaactggggcccctgtggcctcacgctgtgaaactgggaccagtactgtgcgttggggggtgtccaggagctgtgtgtttggtgggcagacttgtcatggactgtggttcgtggagactttgggggactacctgagcggagctggtcatcatagctgcggcggctctgctcacggctgagcacacggtatgcctcgctcagctccacaaagcggntgtgcag

SEQ ID NO: 453 - DNA, 277 bp, Homo sapiens
aaaaaatttcttggcagttaaaaggaagtggcataatgagcaggacaggacagttaccggctccccctcagatgcctctggctggcttctcacattctccaagatccagcctctaggctccagtctcggctacctctgctgggcggtagctcacaccccctttggttccccttctgtgctgccttctcatctgcacaaggaacgcgacgctggtgacagcaaaaaggaggccaaaaaccagggctaggatgtcaccagcagccaggcaggaattcag

SEQ ID NO: 454 - DNA, 233 bp, Homo sapiens
ttttttttttcggttcagtctaatcctttttgtagtcactcataggccagacttagggctaggatgatgattaataagagggatgacataactattagtggcaggttagttgtttgtagggctcatggtaggggtaaaaggagggcaatttctagatcaaataataagaaggtaatagctactaagaagaattttatggagaaagggacgcgggcgggggatatagggtcgaa

SEQ ID NO: 455 - DNA, 466 bp, Homo sapiens
aggaagctctcagcttagggaaagagaataaattttagattatagaacatggattcaaaagtgactggaacaaattggccgacaccttactggtaacctgctattcttctggtgttatccttcaggattgttccactaaaatttatttttcaaaaaatttacttcacattattctatgtaagtgatgacttgtcagtgttccaggtgtatcttagctaaaactagagaatgccctaacttagatggtttttgaagcctatacaattggtattgtttgacccttaagcttttacatctcttagcatggaggacgaagaaagctgtacattgttgcttgagagtctgtacatttagtccagatttgtatttgcactgtcagtatggcaaatgagtgaaaaatgtttaatacactattggattttttatttcctttttttgattcagcttatacccgggctgaaaacct

SEQ ID NO: 456 - DNA, 465 bp, Homo sapiens
gagaataacagtcgggagtcattgtcacaatataatagaaatgttaacaaccagattcatgtaaggactaagtggtcctcatgaattgcattaagactctgtactgctcatattacactccatcctctctgtagtttgctgggtagtggagggggtaagctaaatcatagtttctgacaataactgggaaggttttttcttaaaataacaatggaattggtataattgggattgaaaactaaaacttggaactaagatagagaagatggagtgtatgtagaagggctgttaaaaatgtaaaacttggttgcattatttgtggaggctcaaacttgtgaaggttaataccataatttttccatttgttctgcattttgattctgaaaagaaagctggctttgcccatttcttattaaaaaaacttgttgtacaaaaaaaaaaaaaaaaaaaaaaaaaaagcttgta

SEQ ID NO: 457 - DNA, 373 bp, Homo sapiens
ctatccgcaggaaccgcgagatggtctagagtcagcttacatccctgagcaggaaagtttacccatgaagattggtgggattttttgtttgtttgttttgttttgtttgttgtttgttgtttgtttttttgccactaattttagtattcattctgcattgctagataaaagctgaagttactttatgtttgtcttttaatgcttcattcaatattgacatttgtagttgagcgggggtttggtttgctttggtttatattttttcagttgtttgtttttgcttgttatattaagcagaaatcctgcaatgaaaggtactatatttgctagactctagacaagatattgtacataaaagaatttttttgtcttt

SEQ ID NO: 458 - DNA, 539 bp, Homo sapiens
  misc_feature 497: n = A,T,C or G
aaaattatttaatttgaaatataaaataggtggtcttcataaaaagatgcatgaaatttaccttaccttatattttatactttaagagtacattttatacaaatcagtaaccaggcttctttcatgtttaacctgaaatgaacgtaactataaatgagtatctttcttttatgtagtagcaaaaagagtcaataatcctttcaagaaagatactatttcatttcctcccaacttggattcaccataaacacgatccacaaatgatattggaacctcgccaatagtataattcaactgtcttgcccgaacaatcatctccatctggaagacgtagcctttagaaacacatttttctattaatttctctagaacttcttttcggtataatctgaaacttcctgttaaatcagatgctcctggtctcagcaagatctgagttaaaaaattggccccacggctgattatttttcttttcaaatcccagccatatacacctncatttcctttgtagcgagttccagagacaatatcaaaattac

SEQ ID NO: 459 - DNA, 477 bp, Homo sapiens
aagaaaatgccctatttgcaggggtataatcaagggtactgttcgtacatttctctcttaaagaaaaatagtctatattttaacctgcataaaaaggtctttaaaatattgttgaacacttgaagccatctaaagtaaaaagggaattatgagttttccaattagtaacattcatgttctagtctgctttggtactaataatcttgtttctgaaaagatggtatcatatatttaatcttaatctgtttatttacaagggaagatttatgtttggtgaactatattagtatgtatgtgtacctaagggagtaatgtcactgcttgttatgcatcatttcaggagttactggatttgttgttctttcagaaagctttgaatactaaattatagtgtagaaaagaactggaaaccaggaactctggagttcatcagagttatggtgccgaattgtctttggtgcttttcacttgtgtttt

SEQ ID NO: 460 - DNA, 127 bp, Homo sapiens
  misc_feature 9, 42, 83, 87, 125: n = A,T,C or G
gtgactagntcttggattaatctaactataacattaatgtancacttgattatcttatggaataattctctatctcatctaancctnacaacaaccttgtaaagtattatccccattttatgganga

SEQ ID NO: 461 - DNA, 346 bp, Homo sapiens
  misc_feature 150: n = A,T,C or G
ccagttaatagttgatgagattggtgacattatttattgccacagcctattgtataaactatgcagagttaaatatttgcttgtaaaatattagccaatgttgtcattattttgatgtatttccttggttatgaccaaaaatatgttganatactgaaactaatgtctgtgtgtttaaatgtttaccagcaaattgtcttatcatgttaatgagaatgttcaatgcctgtgtggtaaatagtaaatacaatggcataaaagtaactttctctgaagatgtgatgttcaggctgtgaaatatatatgtaaaagaaaaataaatgttatttgttaaaaaaaaaaaaaa

SEQ ID NO: 462 - DNA, 410 bp, Homo sapiens
ctgccaaggagaccctgttatgctgtggggactggctggggcatggcaggcggctctggcttcccacccttctgttctgagatgggggtggtgggcagtatctcatctttgggttccacaatgctcacgtggtcaggcaggggcttcttagggccaatcttaccagttgggtcccagggcagcatgatcttcaccttgatgcccagcacaccctgtctgagcaacacgtggcgcacagcagtgtcaacgtagtagttaacagggtctccgctgtggatcatcaggccatccacaaacttcatggatttagccctctgtcctcggagtttcccagacaccacaacctcgcagcctttggccccactctccatgatgaaccgcagcacaccatagcaggccctccgcacagc

SEQ ID NO: 463 - DNA, 435 bp, Homo sapiens
aaaccaaattgagattaaattgaagaaaagcaagcaaattaatttcagcttgattatcaacctgtatcaagaacaaaaatgggaggaggtgtccacatttatggtgtgtataggtaacatggggaaaatactattctgtgttttggaaaagaagaaatagtgccgtcctatttatttctatatttagaaatttttctcaaagaaatttcaattgtatctatgagatgggtttctaagtatcttattgtgtgttataagtgccttttaatatcatactaagtgtgagcttctggacattttcaagagcttacaaaaactaagtggcattgtatttttataaccccattgagaagactaagtaagaaatgaaatgtcctatcaattttattttgtcatgcttcaaacaataaagacatttctgctttacctcggccg

SEQ ID NO: 464 - DNA, 407 bp, Homo sapiens
  misc_feature 44, 150, 196, 198, 221: n = A,T,C or G
acaagcttttttttttttttttttttttttttgttacattcaanataaaagatttattcacaccacaaaaagataatcacaacaaaatatacactaacttaaaaaacaaaagattatagtgacataaaatgttatattctctttttaagngggtaaaagtattttgtttgcgtctacataaatttctattcatgananaataacaaatattaaaatacagngatagtttgcatttcttctatagaatgaacatagacataaccctgaagcctttagtttacagggaatttccatgaagccacaaactaaactaattatcaaacacattagttatttccagactcaaatagatacacattcaaccaataaactgagaaagaagcatttcatgttctctttcattttgc

SEQ ID NO: 465 - DNA, 252 bp, Homo sapiens
tgtcagtgtaacatgcagatgtatattgcagtttttgaaagtgatcattactgtggaatgctaaaaatacattaatttctaaaacctgtgatgccctaagaagcattaagaatgaaggtgttgtactaatagaaactaagtacagaaaatttcagttttaggtggttgtagctgatgagttattacctcatagagactataatattctatttggtattatattatttgatgtttgctgttcttcaaacattt

SEQ ID NO: 466 - DNA, 541 bp, Homo sapiens
  misc_feature 494: n = A,T,C or G
ctaacagcatggcccctaaacgccagtctccactcccgcctcaaaagaagaaaccaagaccacctcctgctctgggaccggaggagacatcggcctctgcaggcttgccgaagaagggagaaaaagaacagcaagaagcgattgaacacattgatgaagtacaaaatgaaatagacagacttaatgaacaagccagtgaggagattttgaaagtagaacagaaatataacaaactccgccaaccattttttcagaagaggtcagaattgatcgccaaaatcccaaatttttgggtaacaacatttgtcaaccatccacaagtgtctgcactgcttggggaggaagatgaagaggcactgcattatttgaccagagttgaagtgacagaatttgaagatattaaatcaggttacagaatagatttttattttgatgaaaatccttactttgaaaataaagttctctccaaagaatttcatctgaatgagagtggngatccatcttcgaagtccaccgaaatcaaatggaaatctggaaagga

SEQ ID NO: 467 - DNA, 461 bp, Homo sapiens
  misc_feature 34: n = A,T,C or G
aaaaaaaataataaggtctcatggcttcattcanagaccacagtaacaacagcagcccaccaatcagagaagctggttgttattaaccaagctacagattcacactttctggcctaaaccctaatgggatgaggcttttcaccccaggccatgctggtggtgattttttagcccctaaataaaacactggactatttcctgtttacttcattgattgcaactacaaaggtggactcaaagcaaagcacaatcatgccagccaacattccagaattctgctgagaactccaagtctgtgaggggagaggttttacaagccagacaggcctgggggactgcagtccccaaggagaccctgccacatgctggccctttgagtgagaatgctgcatctttctacatatcttcatgagaatactgagaattggattttccttttcaaaatgcactttgcttttttt

SEQ ID NO: 468 - DNA, 460 bp, Homo sapiens
ccaacccagggacaccgtgctctgctaaatgatgactccagctacatttctcgaggccaagagatgagaagctgctggctccaagctccgctgcaggctgccctggctgagcgggtgctaggcaccgcggagcgctgcctggtgctctgaagccatgccccagtgcctccctgggagttctgctgtggagtctgtgtggaggctgactctggagagatgtttgtgtccaggtggctgcctgtggtctggctaagtaaaggggtgagtattcttggtgtcactgtccaaagcaaagttgtgtccatgggacacagactaggtgaggctctgtgtccaggtgatgctgtccagtgagagggggttgcagtcagagtgaggctgaccggaggcctctgtccagttggtgccctgtggaatgtgattacatactggttgacaccatcctgaggaccatcaccag

SEQ ID NO: 469 - DNA, 505 bp, Homo sapiens
aaaaatatttagttcaagtcacagaatttttctcagtagagaccccaatgcaatgcataattagctgccttagatggcccgtttgaaagggtgatatcccttcagagtgtaactttactgattttggcacagaaaagaagtcttaagaacatgattaaaaaagagggaagaggaacagaggaaagaaataaaagcaagaataaatgagatagtaattgcaatcactaaaaaactgcattctcagtcattgcagaatactgtcttctgtctacagcaggtgcttattccagaattgttattgcagcatggatttaatttgcttggaggtagtctcatcattcaaatgttttgttgtgtacctgagagcatttagaagaccttccacactattaggaggttggtccttaagaactttgatacaacctttcatatcaattttggaagttttagcaaatgctcccactggatgtacgtggtcatagagtattatgacacccaccattac

SEQ ID NO: 470 - DNA, 225 bp, Homo sapiens
cagcccatcagtgtttctttgaggtgattgcattagggaagttggttctgggattgcaaaaaaaaaaaaggtggaacatgttttccttaaaagatggaaggttttagaaaatatactaggccatctggttagaaaaaacagaccagactagaaaaagctgtgaatttgattttgtagattaaacaaagccagatgattaaaatgtgatttatttataaaaaaaaa

SEQ ID NO: 471 - DNA, 401 bp, Homo sapiens
ccatcttgttgctgcttggttagatcatatagctaatgaattaggcaggggagctattttttgaagatgatgaactaaatgttgaagacaagtttgagatctgtaaaatgtgattttttacttccacttataatacttgtgattggggaggtttgtggaaattcaattatgatgaaaaacccatcttttttgtaatgttggcatacttggggaatttagtggcaaatacattccccagcagaaataaggaaataagtatgttagatgcagtagacgatacaggttgcatgtggacactcagtcacattaacaacttgggaaaaaaatggcaatgttacggtgaattctcaggtgaacttttttcagttataaaacatctattttgaatctgtaaatatttt

SEQ ID NO: 472 - DNA, 539 bp, Homo sapiens
cctacttacaagcctccagtctcaaattatccaggatatcctaaacctgaggaaggaatacttgacagtttggatgtttgggtcattgctgtgattgttattgccatagttgttggagttgcagtaatttgtgttgtcccgtacagatatcttcaaaggaggaagaagaaagggaaagcagatggtggagctgaatatgccacttaccagactaaatcaaccactccagcagagcagagaggctgaatagattccacaacctggtttgccagttcatcttttgactctattaaaatcttcaatagttgttattctgtagtttcactctcatgagtgcaactgtggcttagctaatattgcaatgtggcttgaatgtaggtagcatcctttgatgcttctttgaaacttgtatgaatttgggtatgaacagattgcctgctttcccttaaataacacttagatttattggaccagtcagcacagcatgcctggttgtattaaagcagggatatgctgtattttataaaattggcaaaatt

SEQ ID NO: 473 - DNA, 296 bp, Homo sapiens
  misc_feature 37, 70, 103, 109, 112, 124, 128, 147, 152, 180, 192, 200,203, 213, 216, 231, 233, 240, 243, 248, 263, 273, 285, 291: n = A,T,C or G
gtacaagcttttttttttttttttttttttttttcanatctcataaaaggaatttattgcttccttgganattttaaatggaggttactgaggaattaggganccgggnggnttaccccaggcntgtntttgtaggtaacatttganaaaanaaaaaaaaaatcaggaggtcagggaaanaatgtaaaggcntttgtganctntgaggggatntancagcttaagtcccananaaaaggnganagganaaacatttggagganaaaagggatntgataaatcggnccaaanaatag

SEQ ID NO: 474 - DNA, 270 bp, Homo sapiens
  misc_feature 67, 76, 94, 119, 137, 229, 236: n = A,T,C or G
ccgggcaggtttttttttttttttttttttttactttttattatttagcaatacatgtttatcatanaaatttaanaacctaagtaatacaaanaaagtaaggattacctttaattaanaacctaagtaatacaaanaaagtaaggattacctttaatcaataaacaaagataaacttttggagggagcatataccattccagtcactaagtaaggttttaatattcanattccanaattctgatcaatcaatggctatgtttcacactt

SEQ ID NO: 475 - DNA, 454 bp, Homo sapiens
ctggcttcactgctcaggtgattatcctgaaccatccaggccaaataagcgccggctatgcccctgtattggattgccacacggctcacattgcacgcaagtttgctgagctgaaggaaaagattgatcgccgttctggtaaaaagctggaagatggccctaaattcttgaagtctggtgatgctgccattgttgatatggttcctggcaagcccatgtgtgttgagagcttctcagactatccacctttgggtcgctttgctgttcgtgatatgagacagacagttgcggtgggtgtcatcaaagcagtggacaagaaggctgctggagctggcaaggtcaccaagtctgcccagaaagctcagaaggctaaatgaatattatccctaatacctgccaccccactcttaatcagtggtggaagaacggtctcagaactgtttgtttcaattgg

SEQ ID NO: 476 - DNA, 449 bp, Homo sapiens
aaattattactgaccttttgaaagccttcacgtaagtatgcaacagataaaatgactcatttacccacaacaataatctattatcagtcttaagtaatgtgaattcactgtatttctttttatacaacataaaaacttctgctttccaaacttcttccttttcactaatttatcagccactttatttatacacagataacacttttagaaacatttttctttcttgtccatttttttctttcaaaaataaagtttcttagaacctgataaaatggaaacttatggtaatatgtgttctggtaggtgtccaaaaattccacaccatagactatcaatgatatagccaaataaaggccattcaaaaaaatcagtaattgggattccttgccttatatctatggtatagtgtacccatttataacggggttctgccatcttcgaattgtttt

SEQ ID NO: 477 - DNA, 513 bp, Homo sapiens
ccactcagcacatttcatggaggtcatgtcttttcactgatacttttttgatagtttttatataacaaaatccttattctatttataacttaagatgataaggcactataaattaatgacctaaaataatatatttgtctgttatcttttgctatttctacttcactttaatttttagctgtaaaattggtaaatggattcttacaactatctctttccatttcttactatttggttttcaaatttcatttaaatgtcagaatttccttttttaggaacaatgtgtatttcattgcactatttaaaaataagctcaaatttgcatgccatatgcacattttgattacatttttattttctttcgtgaaaggcatgtgcaactacaaatacttcatagctgtttgggttgctcattctacatcacgacaatctcatcatattatttctataacttttcaaggacttgcgatggatggttagtgggatatctggaaattaatttgataatgactt

SEQ ID NO: 478 - DNA, 420 bp, Homo sapiens
gaaattttggatttttcatcactttctctttagaaaaaaagtactacctgttaacaattgggaaaaggggatattcaaaagttctgtggtgttatgtccagtgtagctttttgtattctattatttgaggctaaaagttgatgtgtgacaaaatacttatgtgttgtatgtcagtgtaacatgcagatgtatattgcagtttttgaaagtgatcattactgtggaatgctaaaaatacattaatttctaaaacctgtgatgccctaagaagcattaagaatgaaggtgttgtactaatagaaactaagtacagaaaatttcagttttaggtggttgtagctgatgagttattacctcatagagactataatattctatttggtattatattatttgatgtttgctgttcttcaaacattt

SEQ ID NO: 479 - DNA, 523 bp, Homo sapiens
ttttagaaaagatatgtcagactgggattaatgacagcatgattttcaatgactgtaaattgcgataaggaaatgtactgattgccaatacaccccaccctcattacatcatcaggacttgaagccaagggttaacccagcaagctacaaagagggtgtgtcacactgaaactcaatagttgagtttggctgttgttgcaggaaaatgattataactaaaagctctctgatagtgcagagacttaccagaagacacaaggaattgtactgaagagctattacaatccaaatattgccgtttcataaatgtaataagtaatactaattcacagagtattgtaaatggtggatgacaaaagaaaatctgctctgtggaaagaaagaactgtctctaccagggtcaagagcatgaacgcatcaatagaaagaactcggggaaacatcccatcaacaggactacacacttgtatatacattcttgagaacactgcaatgtgaaaatcacgtttactatttataaact

SEQ ID NO: 480 - DNA, 272 bp, Homo sapiens
cctgccaggagcggcagagagagggacccacatccggaacaagagcctgaagtgccagggtaaaaggcagggagtgatgatctctctcctggagtcgtctgagctgcagccactgggagcaaaagcaggaagaggatgtgacccagatggatcatggtggactggggtctggcaggggtctggcagaggactgtggtccagagaagtccagaggaactgtgggggagcagagaagtagcaatagcggatgtcaccctgctggtgtcaaggcc

SEQ ID NO: 481 - DNA, 269 bp, Homo sapiens
  misc_feature 230, 232, 233, 248: n = A,T,C or G
ctggttggagacatctccatggtcctttcttgtcatgccttccccaatggctgacttcatcagccgcgacagggaagggagcacgttgatgggggggtagatctgtctgttgtgaagctgtctgtccacgtagatctgtccctctgtgatgaagcccgtcaagtctgggatagggtgggtgatatcgtcgttgggcatggtgaggatggggatctgtgtgatggatcctncnngaccctccacacggnccgcccgctcgtagatggtgg

SEQ ID NO: 482 - DNA, 506 bp, Homo sapiens
  misc_feature 457: n = A,T,C or G
aaataaaagaaaaaacatttgagaaagaacaagaaccttttgtttagagaatgaaatataaattgttaataaacaaagtccacaacaatctcttaaaaaaaaagttactacagttatttctcttgtgaatatggcctggaagaatcacttttcccccaacttaagggaggtggagatttatctctatccaagctttcagtataagcagataagaagtaattctcattttcttgagactgacttgatgaaagggcatatggtgtccccaaaaatgtctgatgagtgagaacattaaaatgactaaactgatgggacatatttaattgactatgataaacctgaaagttactatatgaatcttgttctgttgaattgctgttctctccttcagagcacactatatcaatagaagttctctcttcagaatcaaggtaagtcttatcttctaataaactgntttgcacatcaggagacgattgcaactcaatttgagtattctttttttg

SEQ ID NO: 483 - DNA, 451 bp, Homo sapiens
ccataatagtaacaacagcaatatgtctatcctaacttagtcttctagacattgatttgtaacccctgatcccgactgttatggcttgggactggaatgtagccagcctccaaagctgatagcactacctggactattacagtatgcactgaatgaatgagcagaaaacaaaaaaacaagctacatacctggcgctcttcatgttttccatgcacctcaatcacatctcccaacaccttaactttgagttcctctggggagaagtgcttcacatccaggttgacagagaacctgtccttctccaggcgcatctagaaatagcaaggtaagggaatgggatgggagaaagagggcaaaaatactgattacacaggtgctgtcttattctgcagagctgctttctgtccgggtaattcatccttctcttctctgcttaaaaaatctccttttt

SEQ ID NO: 484 - DNA, 269 bp, Homo sapiens
aaaaaagatacaaaaaaagacaaacagttgttcacataaataagaaggggcaataaagaaggaagacgttttcaccattacaacaccttttaggatgtgtcttggggagcaagcaccttacagtgccaactgtttccaaggtccctgggaatgctgctctctacagaggcatgtgcacagacggatcctgcaaatgggattgcaagactttccatttcaaggttaagtcctagctgtagaatcattcatttcattcttgcaaaccagcc

SEQ ID NO: 485 - DNA, 474 bp, Homo sapiens
  misc_feature 365, 426, 433, 439, 469, 471: n = A,T,C or G
aaatcattagagcttaaattgtcagatcgttcattgcctttccagggttatttagtaaagtttgttgaaaacaaaaacgccttttcttggttcttttttcagttattttgaaggtccagcatcctgattaaatgtctgacacattaatgaatgaccagcagcagctttcagctcttaaaaagacacttatattttgattttacatgctggttacctgttccattgttgtcaaatgcccactctccatcagatgtgttcctccattttcttatccacaaagtactcctcacttttcaatttgtcatgttactaaatggtgttacattaaagccctgtgttaagtgtcaaaaaaaaaaaaaaaaaancaaaaaaaaaaaaaaaaaaaaaaaaaaaaaaagcttgtacaaaccaacccagggacaccgngctctgntaaatnatgactccagctacatttcccgaggccaananatg

SEQ ID NO: 486 - DNA, 502 bp, Homo sapiens
gcccgtccgtctccagcacgcaccgggtgtctgatcccaagttccaccccctccattcaaagataatcatcatcaagaaagggcatgctaaagacagccagcgctacaaagttgactacgagtctcagagcacagatacccagaacttctcctccgagtccaagcgggagacagaatatggtccccgccgtagagaaatggaagacacactgaatcacctgaagttcctcaatgtgctgagtcccaggggtgtacacattcccaactgtgacaagaagggattttataagaaaaagcagtgtcgcccttccaaaggcaggaagcggggcttctgctggtgtgtggataagtatgggcagcctctcccaggctacaccaccaaggggaaggaggacgtgcactgctacagcatgcagagcaagtagacgcctgccgcaaggttaatgtggagctcaaatatgccttattttgcacaaaagactgccaaggacatgaccagcag

SEQ ID NO: 487 - DNA, 267 bp, Homo sapiens
gcggctggcgccagatccaggctcctggaagaaccatgtccggcagctactggtcatgccaggcacacactgctgcccaagaggagctgctgtttgaattatctgtgaatgttgggaagaggaatgccagagctgccggctgaaaattacccaaccaagagaaatctgcaggatggactttctggtcctcttcttgttctacctggcttcggtgctgatgggtcttgttcttatctgcgtctgctcgaaaacccatagcttgaaagg

SEQ ID NO: 488 - DNA, 388 bp, Homo sapiens
  misc_feature 186: n = A,T,C or G
tgctcagttaggacccagacggaaccacggaagccccagcgcagcttctcttcctcctgctactctggctcccagatattcctggagaaataataatgacgcagtctccagccaccctgtctgtgtctcccggggaacaagccaccctctcctgcagggccagtcagagtgttgccagcgacttancctggtaccagcagaaacctggcctggctcccaggctcctcatctttggtgcatccaccagggccgcaactaccccagccaggttcagtggcagtgggtctgggacagagttcactctcaccatcagcagcctgcagtctgaagattttgcaatttattactgtcagcagtatactcactcgcctccggtgtacacttttgg

SEQ ID NO: 489 - DNA, 467 bp, Homo sapiens; identical to SEQ ID NO: 293

SEQ ID NO: 490 - DNA, 513 bp, Homo sapiens
atcaggtatctcctcacataagatatgagattatattgtgttatacttatttaattttgtgtgatatttcattcatagaaaataatggcactaatataaaacataattaattcagaaaagtttgtaatctcagtcttgaaggctattgcttttttatgcaatgataaaaaatcagttatctgttgtatatattgtttaattaagtgaatggtaatgtgtaatctcatctacagctaagtctaaaaataattcttctataagtaaaaaaaaatagagaattatggtttcgactaacattaagtatacctttttttgaatcaacaggatgaaaccaaaggagattatgagaaaatcctggtggctctttgtggaggaaactaaacattcccttgatggtctcaagctatgatcagaagactttaattatatattttcatcctataagcttaaataggaaagtttcttcaacaggattacagtgtagctacctacatgctgaaaaatatagccttt

SEQ ID NO: 491 - DNA, 483 bp, Homo sapiens
cgccatctcaaaaaataaaaattaaaaaataaaaaaagaacctggatctcaatttaatttttcatattcttgcaatgaaatggacttgaggaagctaagatcatagctagaaatacagataattccacagcacatctctagcaaatttagcctattcctattctctagcctattccttaccacctgtaatcttgaccatataccttggagttgaatattgttttcatactgctgtggtttgaatgttccctccaacactcatgttgagacttaatccctaatgtggcaatactgaaaggtggggcctttgagatgtgattggatcgtaaggctgtgccttcattcatgggttaatggattaatgggttatcacaggaatgggactggtggctttataagaagaggaaaagagaactgagctagcatgcccagcccacagagagcctccactagagtgatgctaagtggaaatgtgaggtgcag

SEQ ID NO: 492 - DNA, 528 bp, Homo sapiens
aaaaagagggaaaaagaaaagaaaacataatgaaaagagagtctgaattgatgctattctcaaaggtaagctgaactaaatttaggctccccagctaaattcctgacctctgttctgatgggggactaaatggaggtgagaactgcatgcttagaactgacaacagaatttggctcaatctttcaaatccatttacaaatgtttcccttgagcaatttcttaatttttttctcatctggttattgaaaatttctaaagtggagctgacattgtcaaatatgaaaaaaatatttttctggagccatacgaatatgagtagaaatcaaaagcaaagccatttttgaagctatatcttaattactattgactaagcactttgggcagaaatctgactagttagaaagctaactaattaaaatctactatgaatgtctaaggttttgggggaaatgtatatgaatattcagtgactaagattcattttcatccatatgtaacctccgccaaaataagcagcctgttaatata

SEQ ID NO: 493 - DNA, 449 bp, Homo sapiens
  misc_feature 439: n = A,T,C or G
ctgccaagctggggaaaggcttcctttcgaagtgaatagcaaaaatgcattcatgagcaaggcacttttatacacacacagagagaaaaaggaacgtattatgaacacatgaacataaacatattttaatattcagacctcttccctacctcctcccacctccacttaaacaaacaaacaaaaaaaaaggaaacagtttcctgtaacattttagaaaccagtttcacagaatacctacataggaacaatttctgatacattcagttacactaacaatatgatatggtttcaggtcaataatttccactaacaaatacttttattctacaattccctcttttttcctttagacaagacaactaaggctcagcagaaatattcactaggttataagcattcttctctcttcttaaagttgctatatatttacacaatttgngattcctaac

SEQ ID NO: 494 - DNA, 460 bp, Homo sapiens
aaaagttcatcagtgtttttgctactgttaagcttatgcagtttatactgtattttttatgtatcctttatatttaccaaacctgactccctgtaaaggagtgctgtcttaaaaacaactgaaggggttaaagtcgtttcttttagtttaatagatgtgcataaggtagctttagcaattaaattctagtgaagttgatatagtctcatttttaattgtcctgtaatggaacagtagcaaattcactaaacttttgtgttcagagttaaattgttctcagtactttcaatgtaggggaatgtaataaacatagtgtgtatgtttgggttttaattacacattttatatatgagccatttagatatgcagtgttaattctatactgcatttgaagtgtatgtaacttagcttatgttaatgcagtcatgaagttggtttgctccagcatccggtagtcttt

SEQ ID NO: 495 - DNA, 518 bp, Homo sapiens
aaatgcatacttaaaaatgaagtactgttatctaagctactgtgtttagaaaatgttaagaatgagcagaaatttttatagaaaagtataaacggaagaagagataagatactgcgaataggccctcaaacttaaaaaagaaaaaactttgccagttttaaggacatattttgattctttcagtattcttaacacctttttaaacaaagttcttgatagtacccactattattgggtttgttttatgccattattgattcttgatattcaagcatttacaatgtagcatatttgattttcttttttctttctttttttggcatcattaacatttcatttgaaatgcatattgttcttgaagtactttgtttttagcataaatgttgtgcattttatcttagtgtttggatgaaaacatttgtgttgtttagctttcatttgctttgtatatttaataatgtacctttattttccagtatgcctacattttgtattgcacaataaatttattttaagct

SEQ ID NO: 496 - DNA, 270 bp, Homo sapiens
gttatcaacgaaacttctcagcatcacgatgaccttgaataaaaattgcacacactcagtgcagcaatatattaccagcaagaataaaaaagaaatccatatcttaaagaaacagctttcaagtgcctttctgcagtttttcaggagcgcaagatagatttggaataggaataagctctagttcttaacaaccgacactcctacaagatttagaaaaaagtttacaacataatctagtttacagaaaaatcttgtgctagaatacttttt

SEQ ID NO: 497 - DNA, 479 bp, Homo sapiens
aaagtagatagtatactttacatttataaaaaaaaatcaaattttgttctttattttgtgtgtgcctgtgatgtttttctagagtgaattatagtattgacgtgaatcccactgtggtatagattccataatatgcttgaatattatgatatagccatttaataacattgatttcattctgtttaatgaatttggaaatatgcactgaaagaaatgtaaaacatttagaatagctcgtgttatggaaaaaagtgcactgaatttattagacaaacttacgaatgcttaacttctttacacagcataggtgaaaatcatatttgggctattgtatactatgaacaatttgtaaatgtcttaatttgatgtaaataactctgaaacaagagaaaaggtttttaacttagagtagccctaaaatatggatgtgcttatataatcgcttagttttggaactgtatctgagtaacagaggacag

SEQ ID NO: 498 - DNA, 269 bp, Homo sapiens
  misc_feature 228, 257, 263: n = A,T,C or G
ccagcatggtgaaagcccatctctgctagaaatataaaaattagccgggcgtggtggcatgtgcctgtggtcgcagctacttgggaggctaagacaggagagttgcttgagcctggggggtggaggttgcagtgagctgggatcgtgccactgcactccagcctgggcaacagtgagacaccgtctcaaaaaaaaaaaaaaaaaaaaaaaaaaaaaaaaaaaaaaaanggttaggaatcacaaattgtgtaaatatntagcanctttaa

SEQ ID NO: 499 - DNA, 594 bp, Homo sapiens
ttggtagattgtcatattctgcaccagacacaaaacagacgcacagaacacttttcaattggttgcagggaactcttttatcaattcatctgatttttcacagtttagcatagaaccaaaacgtagccaactgatgatacatacatttgatttcattaaaatcagactatttcccatttttccccttctcgcccctctcccccatcctaaaagtaacttctgatggcttacaagaaactcttgcatgaatgcacagaaaggagaggttggggtgatggaaagaattacatatgtactgtggctggttaccatggcaaccctccacagaaatatgatatagatatatataatatatattgtagatatatattatacatatatgtacacatgtataccacgcacccactcacacatacacacacgcactttggaccaacatcatttccaggttcaggaaatagaggatcataatttctgtgacaactcatttttgcaggtactcactggaggtctgagaaccttaaaatgctgtcgctacatttttttcccttccaattcagaaagcaaagtgttaccatagtaacaggactatgt

SEQ ID NO: 500 - DNA, 388 bp, Homo sapiens
aaaagataaacttcaatatggaatgctagaaacacaaatagcactgtcacctctaatatgaacattagtttgaggtagtttttttctaaagcaaaaattttaactgttttctaattgtcaagcactattttcattaaaagtgtctaatgaatcatgatatactcttccatttgttgtgtctattttttatatatttggtattttttgaaaattccaaatactcatgtctcaagtaagcttaaactacaacttgtcacataaaggaagtcttaagtggagttcacagaatgataatgtatctatttgtcatttgtgttatatttgaaattattagaaattatgctttttccattttaattgtattgctgccagtgctatttttttcttt

SEQ ID NO: 501 - DNA, 535 bp, Homo sapiens
aaatccagaaatctttgtactgatgtaaatgattgtagttattttggatagtgttttgctaacaaaaggagagacttttttcatgcatatttctattttgtttttttgggttttattttattttaatagtagtaaaatacttggaataatttttcatattgtcattaatattattttgtatttttatgtggaaatatataattttatgacactaattgctaaagtttattttatgttgaattatttttggagctgaaatctttgtaatattaaagcaactagtttctaattcccagtttctgtatagaatcgcacaagtggtttatggagtgtttggattgtaattataaatggttctttgatatgcaaattaatattttcagttgattttattttatattcctaatggggtgttaaagccgttttttatttttttctaaataaaaagagaacccatgcttttatggacactaggtaaacaccttcagcttaaatttttcgttaaatattttagtttattttattggtatcttcc

SEQ ID NO: 502 - DNA, 275 bp, Homo sapiens
gaagaaagaaattgaagaatcatgtaacatatgtgatcgcatttttgtaaaagaaccatgtgtgtttatatgtgtttatatatatacttgtgtatgcaaaggtaaaagtctgaaaggatatatgctaactgttcacaatgataaccccccaggaatgggattggaggggagggggcttctgtgtttgttatgtatgctgggtgggatattgtgcttttatttctatattgtttgaatttttttacagtatgtattatttttgtaataaaaatttt

SEQ ID NO: 503 - DNA, 538 bp, Homo sapiens
  misc_feature 508, 513: n = A,T,C or G
aaataattacaaagagtgtttgctttcaaatgccatgggttacacttttatgggcatgactataaccatttttgtaaagagtaagagttgtataaaataagaaataaatacagtactcaacttcctttcatattagcatcatcaaccctctaattcaccttatgggggaaatgcttctttttgtttgtgatagctattttatcatttccttcatatttttctcttataaaaatgtatttgatactgtgatatgttcacgaaaagtattctttaattattctttgttatagtagagctgttcattatggatatttctgctgccagtcacaatctaaattaattttggcaaaagattgggtacttagtttcctgttactgagttagctctactcttttggaccaaagcaacatgagggcaagtacttttcacacttgttaagatggagttataactgtcatacatttggaatattatgatcccaagtagtctttttataatttggattgnatcgnatgttagatttttgataaaatttgg

SEQ ID NO: 504 - DNA, 490 bp, Homo sapiens
  misc_feature 434, 439, 466: n = A,T,C or G
ctggatataattcataatgtctggctccaaccatagattaccagacatgaagaaaaggagaaaaatacaacttataatgaagagaataataaattgatcaaaactaacccagagctgacagagattttagaattagtaaacaagggcattgaaatagttactatagctacattatagcataagtctgtatgttcagaaagttaagtggagacatagtaaatataaagaagacccaataaaacttatagagatgaaaagtacagtatctgagatgaaaaatgcactgaatggagttaatgacagattagatacaataaaataaaagattaatgaacttaaaaacaacaatagaaatcatccaaaacccaccacacagagaaaattataatattaaaatgagaacatcagtaagttgtggagtgcccaaaacaganaagtnggatgggagaacaaaaacaacattttncaaaaatatttgaagaaacaatgg

SEQ ID NO: 505 - DNA, 212 bp, Homo sapiens
ctttggtttaacctatacacaatgattaagtgcatttaatattggtaatttaatgaaaaccattccttgcccaatggatgtataaatttttgaaagaataagcagaattatataatatgaaatgctatgtaaagttttctatgtaaaaatattatgtataatactattaaaatatcccatgctttgatcaggtggtacatcaataaaatttt

SEQ ID NO: 506 - DNA, 554 bp, Homo sapiens
aaacaaatgatgctgagaataaggagagaaatgaatgtagagagaggtagagagagaaatatgaactctaacaaaggactgaggagtgcagtctgctggttcaggctcttcaaaagatgtagaaaaagagatagaaggaaccacctatgcttaaaatactgtaaatatgcagtgaggtttggcaaaatctattccatgtgtgatttgcttgtagaaacaattttgaaagccccttgaggaaaataaaaatcaagaagaacacttttctcccttttccatacaaattaaaacttaacagcatcaaattattgggaccagaaaccaagtaatgtataatgtggcttttgttgagttaaataagatgctatataatggagaagaatttgaaaatacacaaaaaaatcaatctacattatcagaacctgcagtgaaattaaacttatgttaaataaaaccagtttgcaggtgcacaaactatgagggtcttgtatccacgtaacacaggtagttacaaaaacatgttattgtactgtgtaaagatgcatagtcatctc

SEQ ID NO: 507 - DNA, 251 bp, Homo sapiens
ccactcagcacatttcatggaggtcatgtcttttcactgatacttttttgatagtttttatataacaaaatccttattctatttataacttaagatgataaggcactataaattaatgacctaaaataatatatttgtctgttatcttttgctatttctacttcactttaatttttagctgtaaaattggtaaatggattcttacaactatctctttccatttcttactatttggttttcaaatttcattt

SEQ ID NO: 508 - DNA, 439 bp, Homo sapiens
aaaaattcttggtagttgagcagctctgggggaataagggcaaatatgcttgttatgaactacactgaaatctaccaaagttaatgtttactttgtgtagatccatttgtctattttatttatttttcccagtgaaaagtgtattttgatagagaacttttcattctataaatacactatgagttactaaaatatcatggattttgtttattcctgaaacatagttacatagttaaactgtacatatgacatggcttatgttaaaaatacccagtgctcagttttgaaagataggcaaaaaaaaaaagtataggagaaactgaagaatgtacacttttttagagggcacattttgctgtaaatctggaaatttgatagacttgactgtgtttgtgaaaactgagcattaaaggttttgattgatcctttctttccattt

SEQ ID NO: 509 - DNA, 520 bp, Homo sapiens; identical to SEQ ID NO: 191

SEQ ID NO: 510 - DNA, 435 bp, Homo sapiens
aaacaaatgtgcaccacgatgtttcaacaagacaaatgccataaatgtgaaagctgcagtttgcaatataccacatttagaatccagcgaaggtgaatcagacagaggtggtagtcattctaattaaacaatcaggtaacttcacgacaagctgatttgcagcatcaaaagtgtccatttaagtttcttttttcttgatgatcagagggcccacattgtctccagtctcttcgttatgttttgtgtgagccccatcacagaatgggaactttttggacctccaacaacggcagtacacagctttatctcccaaatcctccatgtcaaaagcatgtactatcttggggttgtctttctggatgtgaaggtttatcatagctttatttcgatgatctttaacataaaatcttttgtaagctagataaccaattgcag

SEQ ID NO: 511 - DNA, 386 bp, Homo sapiens
aaaaaaaagtagcttatacagcatgtgcttgcaacttaaatataagttgggtatgtgtagtctttgctataccactgactgtattgaaaaccaaagtattaagaggggaaacgcccctgtttatatctgtaggggtattttacattcaaaaatgtatgttttttttcttttcaaaattaaagtatttgggactgaattgcactaagatataacctgcaagcatataatacaaaaaaaaattgcaaaactgtttagaacgctaataaaatttatgcagttataaaaatggcattactgcacagttttaagatgatgcagatttttttacagttgtattgtggtgcagaactggattttctgtaacttaaaaaaaaatccacagtttt

SEQ ID NO: 512 - DNA, 365 bp, Homo sapiens
gtccactaacaatatgtcggacccacggaggccgaataaagtgctgaggtacaagcccccgccgagcgaatgtaacccggccttggacgacccgacgccggactacatgaacctgctgggcatgatcttcagcatgtgcggcctcatgcttaagctgaagtggtgtgcttgggtcgctgtctactgctccttcatcagctttgccaactctcggagctcggaggacacgaagcaaatgatgagtagcttcatgctgtccatctctgccgtggtgatgtcctatctgcagaatcctcagcccatgacgcccccatggtgataccagcctagaagggtcacattttggaccctgtctatccactagg

SEQ ID NO: 513 - DNA, 262 bp, Homo sapiens
  misc_feature 11, 17, 49, 52, 88, 122, 143, 194, 198, 199, 231, 243, 253,255: n = A,T,C or G
gggcctttgcnaacaanccaggccaaaaaggctcaacatttacaccggntgntttaatgagggcattgatcttatcctccgtgactgncacctcatcgtcgtgcagaatgagggccgagtanatgcaggcgagctcggagacngaggccatggcgcgggcgagtgtagggctggcgctgccggacgcggtgctngtcnncggatgaagtgagggcctcaccccaacgcagncttagcttcctnggaaggaccnancaccttg

SEQ ID NO: 514 - DNA, 464 bp, Homo sapiens
aaatagtgctaaatggattaagcgaagacaacaatggttcccctaatgtgattgatattgtcatttttaccagcttctagatctaaactttcaggcttttgaactgaacattgatgacagtgttcatagttcaacctactgaacatacagtgtgcttgattcagaatgttattttgtagaaattaaaattttaacctggtgaaaaataagttgatataagtggtataataaacaatacactgaaatggttactgtcacaaacggtgctaaataatgatataggaggttccactctcaagtcacctagaagtttgattacatattgttacttacaaaactataataaattggatgcacagaaagggagctcctgcccattcaaataaatggagtccatacaacccctgaaaccattaccaacttgaggacttcttccatgccttgttccctgctgacggatgtgg

SEQ ID NO: 515 - DNA, 334 bp, Homo sapiens
cctgaaatctatttgaaagagaaactttcaagaaaaggaaaaaagcattcctctacttagaatagatatgctatgatctgattctgaagcaatgggattgaactgaatgatatatgaggtttcttccatggcccactgatttagatgatagcagtaaaaaatatattagtgaaaatcatttaatactgtaaaagaataaacagatctggacaggaattccgtaaaaatacatgtagacgttagtctaaatacatttttaagatacaatatattttgactaaactgacaggatatcaacagctcattcacttgacagtcatctgttataaagcca

SEQ ID NO: 516 - DNA, 256 bp, Homo sapiens
ccttccacatttttggatgctaatagaacaggcaataggcagttataaatggatacatttcacgctgggggaaaaaagacaatttaaggaagtgagcagtttctgagcaggaatgtggtacagtattaagaatggaagaataatacaataaaattccacactatattaagatagaaaaagtagtgaagaaaatatcatacctgcacataatgcatatataacacaggagaaaacctgtataaaattccatgtattt

SEQ ID NO: 517 - DNA, 372 bp, Homo sapiens
catggcgatcgttgatgtgaagatagtctctggcttcattcccctgaagccaacagtgaaaatgcttgaaagatctaaccatgtgagccggacagaagtcagcagcaaccatgtcttgatttaccttgataaggtgtcaaatcagacactgagcttgttcttcacggttctgcaagatgtcccagtaagagatctgaaaccagccatagtgaaagtctatgattactacgagacggatgagtttgcaattgctgagtacaatgctccttgcagcaaagatcttggaaatgcttgaagaccacaaggctgaaaagtgctttgctggagtcctgttctcagagctccacagaagacacgtgtttttgtatcttt

SEQ ID NO: 518 - DNA, 340 bp, Homo sapiens
aaatgaaatttgaaaaccaaatagtaagaaatggaaagagatagttgtaagaatccatttaccaattttacagctaaaaattaaagtgaagtagaaatagcaaaagataacagacaaatatattattttaggtcattaatttatagtgccttatcatcttaagttataaatagaataaggattttgttatataaaaactatcaaaaaagtatcagtgaaaagacatgacctccatgaaatgtgctgagtggccagggtggaaatgttgtcaaaatgcagcggccctgactgggcaacaacagcctccatgacagtttgttaacttgtctttcgtaggtgg

SEQ ID NO: 519 - DNA, 329 bp, Homo sapiens
cctgcaggggatggaaccttccagaagtgggcggctgtggtggtgccttctggacaggagcagagatacacctgccatgtgcagcatgagggtttgcccaagcccctcaccctgagatgggagccgtcttcccagcccaccatccccatcgtgggcatcattgctggcctggttctctttggagctgtgatcactggagctgtggtcgctgccgtgatgtggaggaggaagagctcagatagaaaaggagggagctactctcaggctgcaagcagtgacagtgcccagggctctgatgtgtctctcacagcttgtaaagtgtgagacag

SEQ ID NO: 520 - DNA, 382 bp, Homo sapiens
ccacttacgctaatcctggaagtatgatcacttttgaacctgccccttaaccttgacgaggatacaaaagtgaaagcatcatcccccaaaggatcactgcacagtcctactacagtatttttaagtagccctctaaatacttaattttaagcaaaatcccttggccgcacttttaaggtttttttatatgtgtatagttaccaacctaaaaataaaaaatccgaacagcatacttgaagaatgtaatactcaaactctcagtgcttccttatggtttctaataggattttttattattgttattattattattgggtttttttggacagggttgggagggtcttttatttttcctttgaaataaagaagtgatgtttttaaa

SEQ ID NO: 521 - DNA, 558 bp, Homo sapiens
  misc_feature 523, 539: n = A,T,C or G
ccaccccagagccatccgatcgatggatgggatgcactctcagaccaagcagcaggaattcaaagctgcttgctgtaactgtgtgagattgtgaagtggtctgaattctggaatcacaaaccaagccatgctggtgggccattaatggttggaaaacactttcatccggggctttgccagagcgtgctttcaagtgtcctggaaagtctgctgcttctccaagctttcagacaagaatgtgcactctctgcttaggttttgcttgggaaactcaacttctttcctctggagacggggcatctccctctgatttccttctgctatgacaaaacctttaatctgcaccttacaactcggggacaaatggggacaggaaggatcaagttgtagagagaaaaagaaaacaagagatatacattgtgatatattagggacactttcacagtcctgtcctctggatcacagacactgcacagaccttagggaatggcaggttcaagttccacttcttggtggggatganaagggagagagagctngagggacaaagagaatgag

SEQ ID NO: 522 - DNA, 588 bp, Homo sapiens
aaaaatgcagaaatgtaaaattacatcttgaaaatatgaagagatggtctacacacttcaaaaatcaaatgttgcttataccagagatgtatgacaatcacgggattcaagtgacaagcagtaagatctcaaaaattaatactggtcaaagataatgggaatatttttgcatttcactgaaaatacattgactactagaatacgaaatctagcaggaactcagggaaaaaaattacaaaatctaaagccaattacttaatatttcttattacctaaacaacagcatgacattaacagaaaactgcacctgcatttcaattgccaatctcacgttaattaagttctccaaaaatgaaatgcaaccaaaacgggttcaaactccaaatgaaagtctgcaaggctcagattaaaacatggaatgtttcagatgaaagtaataaaaacactattggttttgttctttattgaatggaataaaatgttgacatttctttgaaacttggaactactaaatttcatttttccaaatggttctacatttttttcttagtggtgcaagttgtcttaagtagcttaggaagtcaatct

SEQ ID NO: 523 - DNA, 505 bp, Homo sapiens
aattaaagtacacaagtccaagtctaaaactttagtacttttccatgcagatttgtgcacatgtgagagggtgtccagtttgtctagtgattgttatttagagagttggaccactattgtgtgttgctaatcattgactgtagtcccaaaaaagccttgtgaaaatgttatgccctatgtaacagcagagtaacataaaataaaagtacattttataaaccatttactatggctttgtaacaattgcatacccatattttaagggacaggtgaatttactactttctaaagtttattgatacttcccttttatgtaaaatgtagtagtgatacctatatttccacattgtgcattgtgacacacttgtctagggatgcctggaagtgtataaaattggactgcatttcttagagtgttttactatagatcagtctcatgggccatctcttcctcagatgtaaatgatatctggttaagtgttatatggaataaagtggacatttt

SEQ ID NO: 524 - DNA, 380 bp, Homo sapiens
aaaagtatattttagcatattaatggagcaatttaatttacattcagttacaaacctcattcttattaataggtttagggaatgttcttgctggtgtgctgattaccatattagagaaaaaataaactctccatattataattcacctgtttagtaaggtgagtttcttacttgtgatttgagtggattatgcctaaaaattacaagtatatttgcactaagcgacaaaatatgtccctgaaaaatcttagcgtacttgaatcatcaaatgtaatggattgtattgaattctaaatgttaagaagtaagtggatttagggttttgtctttcttttcttatgtcctctctcattcctttatacctttcttcctttctgagg

SEQ ID NO: 525 - DNA, 258 bp, Homo sapiens
cccggcccatcttttatcttttacaccagattttactgcaccttttctatgttttgtttctgttttttttgagaaagagtctcactctgtcgcccagggtggagtgcagtggtgcgctttcggcttactgcaaactctgcctcccgggttcaagtgattcttgtgcctcagcctcctaagtagctgggattacaggcatgtgccacacacctggctaatttttgtatttttagtagagatggggtttcaacatgttgg

SEQ ID NO: 526 - DNA, 288 bp, Homo sapiens
ccagtggccgattgaaaggtatattaaaattaagggcagttttaattctgaagacaaatatcttcatggaaatctatttgtaagcttctgagattgctgctgaaagtctacagtctgtgaatataccaattcccctttacaactgatgcagatcattatgaaatactggaaggcataccctacaatttaggaattggtgtggctgccactgctatgctctcaattgcacactcatcagttcctctgcggatccggaagtagccattctcaccccagccggtgccccag

SEQ ID NO: 527 - DNA, 325 bp, Homo sapiens
tcagaacaagcccctgtattttgctgatcggctgtatgactccatgaagggcaaggggacgcgagataaggtcctgatcagaatcatggtctcccgcagtgaagtggacatgttgaaaattaggtctgaattcaagagaaagtacggcaagtccctgtactattatatccagcaagacactaagggcgactaccagaaagcgctgctgtacctgtgtggtggagatgactgaagcccgacacggcctgagcgtccagaaatggtgctcaccatgcttccagctaacaggtctagaaaaccagcttgcgaataacagtccccgtgg

SEQ ID NO: 528 - DNA, 316 bp, Homo sapiens
gctttctttttaatcccctgcatcggatcaccggcgtgccccaccatgtcagacgcagccgtagacaccagctccgaaatcaccaccaaggacttaaaggagaagaaggaagttgtggaagaggcagaaaatggaagagacgcccctgctaacgggaatgctaatgaggaaaatggggagcaggaggctgacaatgaggtagacgaagaagaggaagaaggtggggaggaagaggaggaggaagaagaaggtgatggtgaggaagaggatggagatgaagatgaggaagctgagtcagctacgggcaagcgggcag

SEQ ID NO: 529 - DNA, 542 bp, Homo sapiens
gccgcctgcaggatgagattcagaatatgaaggaggaaatggctcgtcaccttcgtgaataccaagacctgctcaatgttaagatggcccttgacattgagattgccacctacaggaagctgctggaaggcgaggagagcaggatttctctgcctcttccaaacttttcctccctgaacctgagggaaactaatctggattcactccctctggttgatacccactcaaaaaggacacttctgattaagacggttgaaactagagatggacaggttatcaacgaaacttctcagcatcacgatgaccttgaataaaaattgcacacactcagtgcagcaatatattaccagcaagaataaaaaagaaatccatatcttaaagaaacagctttcaagtgcctttctgcagtttttcaggagcgcaagatagatttggaataggaataagctctagttcttaacaaccgacactcctacaagatttagaaaaaagtttacaacataatctagtttacagaaaaatcttgtgctagaatacttttt

SEQ ID NO: 530 - DNA, 472 bp, Homo sapiens
gaaaataccaccttttccccttgtattacagtacaatgtttacattactatactgtcaagctgaaagtataaaaaatgtacatatacattttgagttatgtatcctttttttaaaaaaaagttcgagtctgttgcactaggctgtacatgactaaagttgacagatgctatgctagatttataatcactagttctggtacttgtgtctttgtatgatcaaagcatgcaataagcaatacaaaataccaagccttatacttaaaagaagtttaacatattggttaatatactggttaatatactggttaaacatattgaatgtatataagtggcaaaactagatttttaaggaagtgtacattataatattggagctcagtactgcatgaagagacttcattaaaactaagaaaacatttatttggggagaaattttaggcatttaagaacttgtatttttctattttacctg

SEQ ID NO: 531 - DNA, 338 bp, Homo sapiens
tgaatatgcaaagcctttctgaatctataataatggtacttctactggggagagtgtaatattttggactgctgttttccattaatgaggagagcaacaggcccctgattatacagttccaaagtaataagatgttaattgtaattcagccagaaagtacatgtctcccattgggaggatttggtgttaaataccaaactgctagccctagtattatggagatgaacatgatgatgtaacttgtaatagcagaatagttaatgaatgaaactagttcttataatttatctttatttaaaagcttagcctgccttaaaactagagatcaactttctcag

SEQ ID NO: 532 - DNA, 587 bp, Homo sapiens
aaaagcttctcagccttcctagggaacagaaattgggtgagccaatctgcaatttctactacaggcattgagaccagttagattattgaaatattatagagagttatgaacacttaaattatgatagtggtatgacattggatagaacatgggatactttagaagtagaattgacagggcatattagttgatgaaatggagtcatttgagtctcttaatagccatgtatcataattaccaagtgaagctggtggaacatatggtctccattttacagttaaggaatataatggacagattaatattgttctctgtcatgcccacaatccctttctaaggaagactgccctactatagcagtttttatatttgtcaatttatgaatataatgaatgagagttctggtacctcctgtctttacaaatattggtgttgtcagtatttttcctttttaaccattccaatcggtgtgtagtgatgtttcattttggttttaatttgtatatccctgatagctataattgggtcatagaaattctttatacattctagatgcaagtctcttgtcggatatatgtattgagata

SEQ ID NO: 533 - DNA, 543 bp, Homo sapiens
  misc_feature 493: n = A,T,C or G
aaaaaataattaaatgcactactcatctcaatgaaatttttcgttttcctattttctagaactttctaaaaaaggaaacaaagcaaaaacaacaacaaaaaaaacctgtttgacttaaggacacttgctgatcttgacacttgataatactttaagaaatggaaaggttttcctaaatctaatacctgcttaatataatccactttggaagattcatctgaaagaaacatagggtttgatttttaatactaatataaaataatctgccttccaatcaaaacaaaaatgttttcaactgtatacgctcctcggttgtgttttgtaccattttcttgaggaaaacgttgtgtaattctttgtgtgttcccttagtaactactgtaaataagacctgcataggtgttcagaaaaatacttagttgcatacaaatccagttagaatctgattttcaaggttttacaacatggtaattttcatttatatccattttgnctacatttcctctatattttgataaataaaaatcttcccatgcttttttt

SEQ ID NO: 534 - DNA, 306 bp, Homo sapiens
  misc_feature 191: n = A,T,C or G
tacaagctttttttttttttttttttttttttggaaataagtcaaagcattgtttatttatgacatatttacatatttacaaaactgattttactcaatacatcatcctgcgtaatatcataaaatgaacaccatatcctgggaataaaaatccatatttcttaataatttatgtatagcccaacttttanaacatagaatattatcaatttggcttcccaaactacaaagtcctgtttataattttttctagccaaggaacagagtagattcaacagcatattaaagtaatttagttaaccctga

SEQ ID NO: 535 - DNA, 481 bp, Homo sapiens
atagaggctgggtcagcagtgggcaaaacaacttcctttgctgggagctctgcttcctcctacagcccctcggaagccgccctcaagaacttcaccccttcagagacaccgaccatggacatcgcaaccaaggggcccttccccaccagcagggaccctcttccttctgtccctccgactacaaccaacagcagccgagggacgaacagcaccttagccaagatcacaacctcagcgaagaccacgatgaagcccccaacagccacgcccacgactgcccggacgaggccgaccacagacgtgagtgcaggtgaaaatggaggtttcctcctcctgcggctgagtgtggcttccccggaagacctcactgaccccagagtggcagaaaggctgatgcagcagctccaccgggaactccacgcccacgcgcctcacttccaggtctccttactgcgtgtcaggagaggctaacggacatcag

SEQ ID NO: 536 - DNA, 538 bp, Homo sapiens
ctgatggttggtaaaaataatttggcctttagtgttaagtgagacatcataagggtattgaggtatacattatggagattgatgtcaggtcagaatattggagttatacatctatttctgagttgaatactcagctcccacgagaaagaaagtagttttaaggtccagcttcttagtctacttgaagcaaattttttttcttttatatttctgaatataaatatactcttatatgggctaaaaagaccccatgaataaatagcaggttcagtagttgaggagtggagtttagtaggtttgttttcagtataaattagataacatgtggaggtcacagcattttggaaattgagtgtccccaagtgagctttgtttataaactttcgaaatgtcggaagtggacaggtttgttaaatcttgtctgccagcacccttttcttcctttgttccttttcctctctgtgttattgcctgcggcagccagtccttcatactagatagagttcagataaagcaaacgtttggcaaaaacatgctg

SEQ ID NO: 537 - DNA, 590 bp, Homo sapiens
aaagaaaaccagcatctctgatgttgcaacatacgtgtaaaatgggtgttacatctatcctgccatttaaccccacagttaataaagtggctgaaaataatagtagctctggcttggtgcttgacctggttaaatactgtcttaaagctcatacaaaacaaataggcttttccataagtggcctttaagaaaacatggaagacaattcatgtttgacaaatgctgacagggtgaagaaagcccagtgtaaaaatgaatcgcgttttaagtgattcggttaaagagtttgggctcccgtagcaaactaatactagataataaggaaatgggggtgaaatatttttttattgttgaatcattttgtgaatgtccccctcaaaaaaagctaatggaatatttggcataaagggcatttggtggttttatttttgtttgagggggattgtcagaaaatcccttttctctcttacgtctaactgactagggaacaattgttgatatgcatagcattggaatacttgtcattatatgctcttacaaataacacatgaagcaagaatgaccaatattctgataattggcactggatc

SEQ ID NO: 538 - DNA, 422 bp, Homo sapiens
aaacatccaataacaggaaaatctagatacagtgatgtgttatacatacatgactgttaacatcagtaatattttatgatagtttaaggttttttattgttttctataacaagttatccaacaggttggactttgtaacatgatatccaaggaccaagttgcatatttaacatcgaatgaaaatgtagttgtacagttccaaaaataattaattttttaagggaatttttcaagacaaaaggcaaatattttgtttcaaacctacaagcaaattcattccaagaagtgaatatagtagtaaaacataaagactattgcaataaaaagtttccaggccagtgacttgtttaattacattcacatttttacattcactttgcctttcaaagcaggagtattttataaaactgaaataaaacttt

SEQ ID NO: 539 - DNA, 320 bp, Homo sapiens
ctggtgacacaagtgagaaatggggaacaagatgtgaacactgaaaagaacgatatatatactgtaaatatgatgaataaaccaaatgtagctataagaatcttaaaggatgattatagaaaagggaaccaaatattttcctcaaatgctttttagagcctttctgtagcgatacaaatatatatatatatatttatccaaaaatatgttttatacagataaatgtttctcaattaaagatgggaccaaagctataggtataacataaagcacattgtcttttgtaagactatttatccacctgaattttcaatttcttt

SEQ ID NO: 540 - DNA, 434 bp, Homo sapiens
aaacagcttttggggggtactttggaagtgtctaataaggtgtcacaatttttggtagtaggtatttcgtgagaagttcaacaccaaaactggaacatagttctccttcaagtgttggcgacagcggggcttcctgattctggaatataactttgtgtaaattaacagccacctatagaagagtccatctgctgtgaaggagagacagagaactctgggttccgtcgtcctgtccacgtgctgtaccaagtgctggtgccagcctgttacctgttctcactgaaaagtctggctaatgctcttgtgtagtcacttctgattctgacaatcaatcaatcaatggcctagagcactgactgttaacacaaacgtcactagcaaagtagcaacagctttaagtctaaatacaaagctgttctgtgtgagaatttttt

SEQ ID NO: 541 - DNA, 126 bp, Homo sapiens
aaagaagttgaagtttaggaatcctttggtgccaactggtgtttgaaagtagggacctcagaggtttacctagagaacaggtggtttttaagggttatcttagatgtttcacaccggaaggttttt

SEQ ID NO: 542 - DNA, 371 bp, Homo sapiens
aaacaactttgtgatatttatattccattgcacagatatgggttatacaaattagtaacacaagttatttcttaaattccaaacattttctaaaatattattacagcagatgcctaggatattaaaacataaaggtggaaatcattctctaaatagttaaatatatttgacactgaaaatactgcacattttaattagaggaaaattaaaatgtgtgctcaaatgcactaacaaactaggtagcagggcaactaacaactacaaataagtcactgtggtccatttttacgtatgcatatatatgattattctctagataatccgtcttcttgaaaatgctaataaaacataaaaatccagataaatgattt

SEQ ID NO: 543 - DNA, 275 bp, Homo sapiens
ctgacccccaggataagcactggctggttgagcagcatcacatgcgggcaacagggggcaagatggcctacctcctcatcgaggaggacatccgggaccttgcggccagtgatgattacagaggatgcctggatctgaagctagaggaattgaaatcctttgtcctaccctcctggatggtggagaagatgagaaagtatatggagacactacggacagagaatgagcatcgtgctgttgaagcacctccacagacctgaggccgggtcccctgg

SEQ ID NO: 544 - DNA, 332 bp, Homo sapiens
aaagttattccagtgactttccagcttaaaatttggaagcaaattttccttaagaggctatcaagtaccagtatcttcacgttggtcagctgttacatacggcccaccagttcacaactcaatagcacgtacactacatgttcaaatctgtaatctttcacagcacagtaacaaagttattaggaaaacaggactaccacaaccaaagatgttacagagtgcacacaattctggcagagagagccatgatcaaagagtggttttctttaggaaacaattctactaaaaaacaacgtggtaatagaagtaatttaaaatgttcaagacattaa

SEQ ID NO: 545 - DNA, 304 bp, Homo sapiens
aaaaagcacaaaacttttggaatgttaatggataactactattagtctcaaaattctaggcatttctataaaacattggtcaatgtgactagtaagttaacgggaccaaggtttcaaagatcaatactgaaccttgataaataataagaggaaatgtaactccacaaaatgtttctgattaagtttgtgcccatgcaaaattaacataaatttcttaactcaagaatgaggaatattaaagcaatgtattttttcaacataaagcatgcattttctaatacattcttaaacatttcaaaatttt

SEQ ID NO: 546 - DNA, 492 bp, Homo sapiens
gtactgcagtcagcttcagggcagcttcctgccacagcagcattaaatgaagttggaatttacaaactggctcaacaagatgttgagattctacttaatttgaggacaaattggcctaatactggaaaataatgtctttcagaaaaaggtttctttggtttttgtttctaagaaagaggaagccaattggatttcaagttatatgatgaaattctgaattaatgaaactggaaaactttatagaattacttattatcttggatttatggtgttattaaaatgctgaccatatttccttcatcctcttgttcctaaggaaacaaaaacagaaaacgaaacaatgaaaactcaattctatttacaagtataaatgctgagtatgtctgttgaagacaagagcagagatattaaattataaccaactttcaatttcctgtgctaattaagggaaattctgttgtggataatcaaacatagccaataaattttttt

SEQ ID NO: 547 - DNA, 593 bp, Homo sapiens
  misc_feature 173, 577: n = A,T,C or G
cctttctctctgcacgaaaaacaggtagtttgcagtctgagatatgggagagcttttaggctacacagcaacccaagggacctctcaccttttgctgagcttcaatcaggaagctatttgcctggctccagcagatgatgagataatgaggtagtgggttttttattactgtnccattttgcaacatcctgcaacaccatcctgggagacaagagcattaccgaacttggctttcacgggggagggttgtattcagtaaaaaagaatagtaaatataaggtcactgagattctaagtaagatagtaaatctaaggtcactgagccaaatccttttcaataggcatatattaacaggctgcttattttggcggaggttacatatggatgaaaatgaatcttagtcactgaatattcatatacatttcccccaaaaccttagacattcatagtagattttaattagttagctttctaactagtcagatttctgcccaaagtgcttagtcaatagtaattaagatatagcttcaaaaatggctttgcttttgatttctactcatattcgtatggctccanaaaaatatttttttca

SEQ ID NO: 548 - DNA, 554 bp, Homo sapiens
cgaagatgcagacttgagggctcggacaaaaatagtttattctacatatagtcgaaaatctgccaaagaagtaagagataaattgttggagttacatgtgaattattatgttttagaagaggcatggtgtgttgtgagaactaagcctggttgcagtatgcttgaaatctgggatgtggaagacccttccaatgcagctaaccctcccttatgtagcgtcctgctcgaagacgccaggccttacttcaccacagtatttcagaatagtgtgtacagagtattaaaggttaactgagaaggatactacccattttactatggcacaatgccgtgtgtcaaaaacaatcaccctttggcttattcacattaataaaaatcacaagctttaataacagacacttaaaaataagataaaaatggattggaaatttttctgattactaaaaggtaaattacttttctgttcattgaatgtcagccttattaagcttgtcatataagttattaaatcattcatgtcatactgcataaacaaatgttcatttcagaatttt

SEQ ID NO: 549 - DNA, 115 bp, Homo sapiens; identical to SEQ ID NO: 244

SEQ ID NO: 550 - DNA, 439 bp, Homo sapiens
cggaggcattgaaattttcagcagagaccttccaaggacatattgcaggattctgtaatagtgaacatatggaaagtattagaaatatttattgtctgtaaatactgtaaatgcattggaataaaactgtctcccccattgctctatgaaactgcacattggtcattgtgaatatttttttttgccaaggctaatccaattattattatcacatttaccataatttattttgtccattgatgtatttattttgtaaatgtatcttggtgctgctgaatttctatattttttgtaacataatgcactttagatatacatatcaagtatgttgataaatgacacaatgaagtgtctctattttgtggttgattttaatgaatgcctaaatataattatccaaattgattttccattgtgcatgtaaaaataacagtatttt

SEQ ID NO: 551 - DNA, 392 bp, Homo sapiens
aaaaaaatgtaaacagcttaatttttacattattgtaaaaaagaagactcactccttaatgtggcttaatttttttttaagtgagcaaagcctggtgctcatggataaagaatgaaaataattctttacatagaaacattgtgctccagtgtggcaaagaaaaaaaaattatatgtacacatataaagaaaagaatcttaagcccacaatttagaccacaaaaaaatcttgtccccaaattgagaaatttataaaaaccatttacatatggttgttgacctactggaaacctatataccattttcaaaacaataactcagtcaaaagataccacttttattaaaaatgaaattttgtgcaaaaaaaaaaattgtttaagctagaaacaagac

SEQ ID NO: 552 - DNA, 524 bp, Homo sapiens
  misc_feature 220: n = A,T,C or G
aaattgttaagtagaatatgaaaccgaatttgtagctagtaccagagaatggacttaactgtttggtgtttaatgagaacagcttctacacaggatcccaagagacttacagaaaaggggcaaagccctaatattaagcaaataaaactcatgtttcaaacagattatacaaaaattgatttatacttcatttcccttttttgatatttagaaagtgcanatttaacaaaaggtagccatatcctttctatgtacaatgccgattataattatgcaaaactgtcagtctgttatccaaaaatcccagtgtttagctctccaaccttaagtcatggaattgaataagaattaaagagggttaaaataaaaaagctaatgccacattccagataaagggaagcaacaaatacattaatctaacaacagtaggtttaacctaaacttttcaaaaagcttaacatcatttcattatatttttagtggaaaattagggattatttggcaatgctgctttttactagtag

SEQ ID NO: 553 - DNA, 450 bp, Homo sapiens
tctccgagatgggtgtaatgcctgagattgcacaagctgtggaagagatggattggctcctcccaactgatatccaggctgaatctatcccattgatcttaggaggaggtgatgtacttatggctgcagaaacaggaagtggcaaaactggtgcttttagtattccagttatccagatagtttatgaaactctgaaagaccaacaggaaggcaaaaaaggaaaaacaacaattaaaactggtgcttcagtgctgaacaaatggcagatgaacccatatgacagaggatctgcttttgcaattgggtcagatggtctttgttgtcaaagcagagaagtaaaggaatggcatgggtgtagagctactaaaggattaatgaaagggaaacactactatgaagtatcctgtcatgaccaagggttatgcagggtcgggtggtctaccatgcagg

SEQ ID NO: 554 - DNA, 551 bp, Homo sapiens
cctcttactgaggaagaaattgttgacctaagagaaaggcattatgattccattgccgaaaaacaaaaagatcttgataagaaaattcaaaaagagttagccttacaagaagagaagttaagactagaagaagaagctttatacgctgcacagcgtgaagcagccagggcagcaaagcagcgaaagctcttggagcaagaaaggcagagaattgtgcagcaatatcatccttccaacaatggagaatatcaaagttcaggaccagaagatgacttcgaatcttgtttgagaaatatgaagtcacagtatgaagtttttcgaagtagtagactctcatcagatgctacagttttgacaccaaatacagaaagcagttgtgatttaatgaccaaaactaaatcaactagtggaaatgacgacagcacatccttagatctagagtgggaagatgaagaaggaatgaatagaatgcttctaatgagagaacgttccaaaacagaggaagacattctacgggcagcacttaagtatagcaacaagaagactggaag

SEQ ID NO: 555 - DNA, 241 bp, Homo sapiens
ctggaaactaatctccgtgttcttgaatgtgctgagagtcctgatgaccactttgtctccttcttgactgataattaccgttggtttggtcacatttcccacctgcctagtggcaaagcccacgcctagagccttcatgtactcatcaaagttctgactgttggtcagcttccaggtagcacagaaagcctccaccatccttgccctttcccctctttagagacaggagcggggatcttct

SEQ ID NO: 556 - DNA, 589 bp, Homo sapiens
gaagaagcctatattttatttgtaagaaagaatgccattgtggtattaattccaaagtatggtttagaagggacagtcttttttgaagaaaaggacaaaccaaacccacagcttatttatgatgatgagataccctcacttaaaatagaagatacagtgttccatgtatttgataaagttaaagtgaaaatcatgttagactcatctaatcttcaacatcagaagatccgaatgtccctggtagaaccacagataccaggaataagcattcctactgatacttcaaacatggaccttaatggaccaaagaaaaagaagatgaagcttggaaaatagctatattcaacaaaaatcttcaaagactggtttcttttttaaaagaaaaaacttgaaagaacacttctaagcctaagtgtgtgatacagtttgttacttttaagtacattttaataatttcagacatctgcatttttattgaacagttgactgtatctgacccatcatactactatacttctgggttgaacagaattatttatgcagaataattcaattgaatatccatcacttaaatacagtgacaggacag

SEQ ID NO: 557 - DNA, 313 bp, Homo sapiens
ccttagaccaggcaatcattacggcagtggttcttcaacttcagcagcagcaaaacgatctggcgggggcttggtgaaacagactgctgggctcgaccaccagaatttctcattcagagggtctggcctgatcacttgcatttctaatcacttcccaggtgatgcagatgtttctggtccagggaccccagtttgagaaccactgtattaaaatttccttcatctctatagaaatggaaagattttttataagtcctctaatttgctttaagataaatgagatttcacttaattctgttggagaaattgtttt

SEQ ID NO: 558 - DNA, 425 bp, Homo sapiens
  misc_feature 335: n = A,T,C or G
ctgttccaaacgggccagccctggggctttggggctgggcctccgtgaggagaggtcagtcggtcagcggcccggggtggctgccctgagccccagggctggtcctggggtctgtcagtccttccccaggctttccaggtccagaaggctttgtggggtctggggctgtgtcagggtaaggaaagctgaagatgagtggggtaaaaccccagacgccatgaaagctgccatggccctggagaaaaagctgaaccaggcccttttggatcttcatgccctgggttctgcccgcacggacccccatctctgtgacttcctggagactcacttcctanatgaggaagtgaagcttatcaagaagatgggtgaccacctgaccaacctccacaggctgggtggccccgaggctgggctgggcgagtatc

SEQ ID NO: 559 - DNA, 337 bp, Homo sapiens
  misc_feature 228: n = A,T,C or G
ctgttggttgtcttgtggtcattaaagacaatgttaagaatcaggagtacttaagtgctagtggttacaaattttgttctcttcagtttttcattaagtaaattctaatagatgatatacatattactgcagataaaaccatcatcagaaattattaaattaattgcatattttgagctactctttatggaaagaagtaaaatatttaatacttgtaaggcagcaganagttggtttagaaactctcagctatttctataaaaatagaatggttagtaaaaatagcattcagtgtattttccttagggaggctatttataatgaaatctgtgactca

SEQ ID NO: 560 - DNA, 230 bp, Homo sapiens
aaaaatatttataaagttacatgcaattttgtagaattgacaaaagaatggctcaaaaatgggagaattttccttcattcctaaaaagaaaatatgtccaatagaagctgtgaaggtatcgagtacacaaggtgtccagtttcagtaccaaagccttctctttttgtgcacgtaagactcacacatgtgatgagggcttgttacaacgcacgtgaggccgcggcggatgg

SEQ ID NO: 561 - DNA, 335 bp, Homo sapiens; identical to SEQ ID NO: 395

SEQ ID NO: 562 - DNA, 321 bp, Homo sapiens
gtgcgagatagtagtagggtcgtggtgctggagtttaagttgagtagtaggaatgcggtagtagttaggataatataaatagttaaattaagaatggttatgttagggttgtacggtagaactgctattattcatcctatgtgggtaattgaggagtatgctaagattttgcgtagctgggtttggtttaatccacctcaactgcctgctatgatggataagattgagagagtgaggagaaggcttacgtttagtgagggagagatttggtatatgattgagatgggggctagtttttgtcatgtgagaagaagcaggccg

SEQ ID NO: 563 - DNA, 437 bp, Homo sapiens
aaattgtgtgaaatagtataaaaatcattggtgttcattatttgctttgcctgagctcagatcaaaatgtttgaagaaaggaactttatttttgcaagttacgtacagtttttatgcttgagatatttcaacatgttatgtatattggaacttctacagcttgatgcctcctgcttttatagcagtttatggggagcacttgaaagagcgtgtgtacatgtatttttttctaggcaaacattgaatgcaaacgtgtatttttttaatataaatatataactgtccttttcatcccatgttgccgctaagtgatatttcatatgtgtggttatactcataataatgggccttgtaagtcttttcaccattcatgaataataataaatatgtactgctggcatgtaatgcttagttttcttgtatttacttcttttttt

SEQ ID NO: 564 - DNA, 466 bp, Homo sapiens
ctgataccacacattgaaaggtaaacattaatatttcaaatctgatgtctaactaaaaatgtacagaatgaaaactagaaaatttcaaccccagattatcttcaaccttgctccctccaccaatcatactttgacatttatctatttccctctccacttatggatgtaattggcttgctatagaaactacagttcagatgctttgaatgtatgaactacaatgaacaataaagtcctcttcttttgaagcatattttggcttcagctttaagataatcttatgacaagaagggtcacactgattcacttaataaattccattcttacctaacacaaggtttagttgataagcacttggacaaaaataatacttttcaaaaatgtaaagcaaactagtgaggacaaaggattttgtcctcatctcaacaatgatcagctattggaactgcatgaaactgaacaattt

SEQ ID NO: 565 - DNA, 383 bp, Homo sapiens
  misc_feature 8, 18, 20, 21, 43, 49, 59, 340: n = A,T,C or G
aaatcatntatctggatntnnatgttttattagcattttcaanaagacngattatctanagaataatcatatatatgcatacgtaaaaatggaccacagtgacttatttgtagttgttagttgccctgctacctagtttgttagtgcatttgagcacacattttaattttcctctaattaaaatgtgcagtattttcagtgtcaaatatatttaactatttagagaatgatttccacctttatgttttaatatcctaggcatctgctgtaataatattttagaaaatgtttggaatttaagaaataacttgtgttactaatttgtataacccatatctgngcaatggaatataaatatcacaaagttgtttaactcaaaaaaa

SEQ ID NO: 566 - DNA, 483 bp, Homo sapiens
aaagatattttcttgaattatttagaacatggtaagcctggtattttttaatcaaacaaaatatttatgaaatgggttttctcttaattctggattcatcatggctttctaataccaattgtaatatttacaatattcaccaaaacttagaattttgcaaatgctggaattctgccagtgtttctttgctaagccttgcatgcaaaatttgaaattttaacattggcacccaaaacctacatggaatgtatgtctggagtatttcaaactttacattgaaacataatttccttggaaaacaaaccataagcctgaggaggtttttatcaactggaatgctttatattagtttgtttttcactgtacattcctcattttacattcatttaacctgccgattatttaatttttttattgtaaagtagtttttagcatttgcttttatttttttactttgatgccttttcaaattggcatgtcttt

SEQ ID NO: 567 - DNA, 336 bp, Homo sapiens
gtgcaagtgccccagggggcggggtgcagaagaatccgagtgtttgccaggcttaaggagaggagaaactgagaaatgaatgctgagacccccggagcaggggtctgagccacagccgtgctcgcccacaaactgatttctcacggcgtgtcaccccaccagggcgcaagcctcactattacttgaactttccaaaacctaaagaggaaaagtgcaatgcgtgttgtacatacagaggtaactatcaatatttaagtttgttgctgtcaagattttttttgtaacttcaaatatagagatatttttgtacgttatatattgtattaagggcatttt

SEQ ID NO: 568 - DNA, 587 bp, Homo sapiens
  misc_feature 582: n = A,T,C or G
aaagtgttatattttttataaaaatgtttatttttaatgatatgagaaaaattttgttaggccacaaaaacactgcactgtgaacattttagaaaaggtatgtcagactgggattaatgacagcatgattttcaatgactgtaaattgcgataaggaaatgtactgattgccaatacaccccaccctcattacatcatcaggacttgaagccaagggttaacccagcaagctacaaagagggtgtgtcacactgaaactcaatagttgagtttggctgttgttgcaggaaaatgattataactaaaagctctctgatagtgcagagacttaccagaagacacaaggaattgtactgaagagctattacaatccaaatattgccgtttcataaatgtaataagtaatactaattcgcagagtattgtaaatggtggatgacaaaagaaaatctgctctgtggaaagaaagaactgtctctaccagggtcaagagcatgaacgcatcaatagaaagaactcggggaaacatcccatcaacagggctacacacttgtatatacattcttgagaacactgcaatgngaaaa

SEQ ID NO: 569 - DNA, 393 bp, Homo sapiens
  misc_feature 145, 167, 211, 282, 295, 299, 347, 351, 374, 375, 388: n = A,T,C or G
tttccaggactgttactccagcaagttcttgaagcactgggaccacctcacccaggtcaagaagccagtcatcgctgctgtcaatggctatgcctttggcgggggctgtgagcttgccatgatgtgtgatatcatctatgccggngagaaggcccagtttgcacagncggagatcttaataggaaccatcccaggtgcgggcggcacccanagactcacccgtgctgttgggaagtcgctggcgatggagatggtcctcaccggtgaccggatctcagcccnggacgccaagcangcangtcttgtcagcaagatttgtcctgttgagacactggtggaagaagccntccngtgtgcagaaaaaattgccagcnnttctaaaattgtngtagc

SEQ ID NO: 570 - DNA, 312 bp, Homo sapiens
  misc_feature 172, 185, 200, 212, 224: n = A,T,C or G
ccaccttcaaagcatgtgctcttcaggaaagcattttccataggaacctttttccacaggaacctttttccctaggaaactttttccataggaagcaccatcccttggtaaggatgtgcagtagtttatttaaccagaccctacttctgaaacgttactattatccaccacnctgatctgaacgnccaggggcatatgtntctgtgcacttntccaattatttntcaggataaacacccgaaaaggaattcgtggctgaaaaggtattgatttagtgttcatcggttgctttctgtgttaatctgtgtcctt

SEQ ID NO: 571 - DNA, 463 bp, Homo sapiens; identical to SEQ ID NO: 287

SEQ ID NO: 572 - DNA, 542 bp, Homo sapiens
ccaccaaagcacacggagattctgtcaggcgctgagacaccacagccttttcaatcttgtccttaagggctttatctttcatccaattcagcagaggctcaaattctttctcaactgcttcacgactctccttagttttctcactttcatcgaacttcactccttccttggcaacattctggaacctcttcccatcaaattcgggaagggcctgaatacagtattcatccacaggttctgtgaggtaaataacttcatagccctttttcagaagtcgctcaacaaatggagaagattcagcctcttttctgctggacccagccatgaagtagattttgtcttgtttttccttcattctttccacatactggtctaggctagtaatgtcagttggatgatgagaagactggaacctaagaagtttagcaagacgtgttcgattcgagtggtcttcaatcacaccaagcttgatgttggtaccaaattctttccaaaaagtatcattgtatttatcatcagcaatcttcttgatcatgtccagc

SEQ ID NO: 573 - DNA, 343 bp, Homo sapiens
aaattaaatatttgaatataaaatagctctaagaaagaagcaaattatcactgaacatatttcttattatttctggctttgaattatacgtaacttaaattgtcttaaatgatacagaatattggagaatatgatactttcacataatatactatgaacctgttcatataactctgattgactactaacttctgttttatgtatttattaaagagctgacactgtagtttgtggtgagatgtttatttttctaacagagcttataacagttaggacaaggcatttaattaatgcatcattctgtttagtagtaggtgttaatcaatatgaaattctctgtttt

SEQ ID NO: 574 - DNA, 430 bp, Homo sapiens
agacagtctgcattgagaaaaatgaaacacttggtggaacatgcttgaatgttggttgtattccttctaaggctttattgaacaactctcattattaccatatggcccatggaaaagattttgcatctagaggaattgaaatgtccgaagttcgcttgaatttagacaagatgatggagcagaagagtactgcagtaaaagctttaacaggtggaattgcccacttattcaaacagaataaggttgttcatgtcaatggatatggaaagataactggcaaaaatcaagtcactgctacgaaagctgatggcggcactcaggttattgatacaaagaacattcttatagccacgggttcagaagttactccttttcctggaatcacgatagatgaagatacaatagtgtcatctacaggtgctttatcttt

SEQ ID NO: 575 - DNA, 574 bp, Homo sapiens
aaagaaagactttaacaggtgtcatgaagaacaaactggaatttcattctgaagcttgctttaatgaaatggatgtgcctaaaagctcccctcaaaaaactgcagattttgccttgcactttttgaatctctctttttatgtaaaatagcgtagatgcatctctgcgtattttcaagtttttttatcttgctgtgagagcatatgttgtgactgtcgttgacagttttatttactggtttctttgtgaagctgaaaaggaacattaagcgggacaaaaaatgccgattttatttataaaagtgggtacttaataaatgagtcgttatactatgcataaagaaaaatcctagcagtattgtcaggtggtggtgcgccggcattgattttagggcagataaaagaattctgtgtgagagctttatgtttctcttttaattcagagtttttccaaggtctacttttgagttgcaaacttgactttgaaatattcctgttggtcatgatcaaggatatttgaaatcactactgtgttttgctgcgtatctggggcgggggcaggttggggggcacaaa

SEQ ID NO: 576 - DNA, 295 bp, Homo sapiens
cagtagtctatagttaggattaaaataggatctgaacattcaaaagaaagctttggaaaaaaagagctggctggcctaaaaacctaaatatatgatgaagattgtaggactgtcttcccaagccccatgttcatggtggggcaatggttatttggttattttactcaattggttactctcatttgaaatgagggagggacatacagaataggaacaggtgtttgctctcctaagagccttcatgcacacccctgaaccacgaggaaacagtacagtcgctagtcaagtggttttt

SEQ ID NO: 577 - DNA, 341 bp, Homo sapiens
  misc_feature 94, 97, 117, 146, 178, 180, 210, 224, 233, 255: n = A,T,C or G
tttttttttttttttttttttttttttggctaattactaccttttattctaatgtgaaccatggccctgaaagctgataacaagcttggctgancanagggaactaggggtcggcanaaaggattatgggtggaaaacattggctnttccttggggagtgatgctggggaaagggaananagtggctcccaccgggccacggccccacanacccagcacgtatntcccatgcnccaagtggagcccccagccaanaagccagccacaccagcagaggatgacgaggatgatgacattgacctgtttggcagtgacaatgaggaggaggacaaggaggcggc

SEQ ID NO: 578 - DNA, 232 bp, Homo sapiens
ccacttcctgggacctcacgcccctgttgacagatggagattgggcagcagggccttgctgcattgctatctgctgttccgacttggtttgtcttgtccaagggtgacgaaagagccaggcaccagggtctcatgggatgaggtacagggtgggagatgggggaggggctgggggctgaagggagcaagaaagctgtagctgtgtggggctggcaggatgttgaagaccgcc

SEQ ID NO: 579 - DNA, 78 bp, Homo sapiens
aaaaaaaaaaaaaaaaaaaaaaaaaaaaaaaaaaaaaaaaaaaaaaaaaaaaaaaaaaaaaaccaaaaaaaaaaaaaa

SEQ ID NO: 580 - DNA, 473 bp, Homo sapiens
ctgtagagtggtctggagggggctcttccattctcacacgtgtgtgcatgaaccctttctcctatcctaaaggcccttcgggaagaagctctagctggtgatgagagcaaggtttgggggccgctacacttcggcagtgcagtgttgggaaggtgagaacacagttctaaagaacaagaattgttgagtctgaggaatatggggtctggacccccagcacatccccttcataggtctccatgggttgggagagcagggtcaccctcatttttgttgcaggattcacttgcagtgtgaatttcaattgtgctggcatcagaaccttcagacagcatactcagggcttcgtcagaagtctgcccacccacttgagacaccttcccggaagcagggttttcatggggcatcagtggggatgggtgagccccctcagcagccgaggtggtcagtgattcccactggatctccttcct

SEQ ID NO: 581 - DNA, 467 bp, Homo sapiens
cctggacaatgatgaccttgggtttgtccttcagactgaggcagttgcggttgttgaatatctggaagatggtgtcataaagcagcacatctggtttttttctcatcatgcacagttccgcagattccctccaggatgccatgagacatgagtaccaagaatgtgctgtcagaggacttgtgctctggtctggtagcaaatgccctcagcgctgactccatatccctggctgtcagattctcttctacatctacactatagtccagaccctcaagtagctccttcatccctgtgatgtcaaagtcagctccattcctcggaggcagatggtcaaactctgtattgcatatgatgagagccaggcgtgtgcggttgtttctctcctttattggatagatctcttcagctctttctttacatagtctcaggaattcttcatgaggacaaagcttgagggcatctgtaga

SEQ ID NO: 582 - DNA, 115 bp, Homo sapiens; identical to SEQ ID NO: 244

SEQ ID NO: 583 - DNA, 301 bp, Homo sapiens
ttttgctttaattccatgaatgttcctgcctccttgatatttgtatttattctttttttctctagagtagaggtataattgtgtgatatttcagaaatacagataaatgattcaaaaagtcacagttaaggagaatcatgtttctttgatcatgaataactgattagtaagtcttgcctatattttcctgatagcatatgacaaatgtttctaaggtaacaagatgagaacagataaagattgtgtggtgttttggatttggagagaaatattttaatttttacctcggcccgaccacgct

SEQ ID NO: 584 - DNA, 244 bp, Homo sapiens
  misc_feature 49, 112, 140: n = A,T,C or G
cctctttttaccagctccgaggtgattttcatattgaattgcaaattcnaagaagcagcttcaaacctgccggggcttctcccgccttttttcccggcggcgggagaagtanattgaagccagttgattagggtgcttanctgttaactaagtgtttgtgggtttaagtcccattggtctagtaagggcttagcttaattaaagtggctgatttgcgttcagttgatgcagagtggggttttgc

SEQ ID NO: 585 - DNA, 238 bp, Homo sapiens
aaactatgttcctaacaaaatgagatgataggatagatcctggttaccactcttttgctgtgcacatacgggctctgactggttttaatagtcaccttcatgattatagcaactaatgtttgaacaaagctcaaagtatgcaatgcttcattattcaagaatgaaaaatataatgttgataatatatattaagtgtgccaaatcagtttgactactctctgttttagtgtttatgttt

SEQ ID NO: 586 - DNA, 258 bp, Homo sapiens
aaagaatgctctttacttcatggacttccactgccatcctcccaaggggcccaaattctttcagtggctacctacatacaattccaaacacatacaggaaggtagaaatatctgaaaatgtatgtgtaagtattcttatttaatgaaagactgtacaaagtagaagtcttagatgtatatatttcctatattgttttcagtgtacatggaataacatgtaattaagtactatatatcaatgagtaacaggaaaatttt

SEQ ID NO: 587 - DNA, 499 bp, Homo sapiens
ctgacaggacatcttacaagagaatttgcacatctctggaagcttagcaatcttattgcacactgttcgctggaagctttttgaagagcacattctcctcagtgagctcatgaggttttcatttttattcttccttccaacgtggtgctatctctgaaacgagcgttagagtgccgccttagacggaggcaggagtttcgttagaaagcggacgctgttctaaaaaaggtctcctgcagatctgtctgggctgtgatgacgaatattatgaaatgtgccttttctgaagagattgtgttagctccaaagcttttcctatcgcagtgtttcagttctttattttcccttgtggatatgctgtgtgaaccgtcgtgtgagtgtggtatgcctgatcacagatggattttgttataagcatcaatgtgacacttgcaggacactacaacgtgggacattggtttgtttcttccatatttggaagataaatttatgtgtagac

SEQ ID NO: 588 - DNA, 528 bp, Homo sapiens
aaaagaaaaagaggaaacgatgaacaaaaactaatctaattgccaagttagaattcattatttaatttacctcctatgcaatgattaatgctgcaaaatgtatggttatgttaccgtatattcacaaaagaaatattattacaaggtttcagaggtagccaattgcattcttttggaaatttactgtactgtttcaatgtgttaagtgccttgttgtaaagtaaaattttaagtctagattcattattttcctgacatatatttttcattatgatatctactgtatgctattgtgatagttttatgaaatgcttacattttaatcaaatatgtaaatttcagaagctcttttttcctacccaccagtaccttaatcattggtttatcacattggattcaaattcaggttccttttttgataaagaggaaatttgttttccatgcttgtgattttgtgtttgtaaacatttcaggaggaatttaggagtgtaactatagtttatacttctataatgttgtcttacattt

SEQ ID NO: 589 - DNA, 180 bp, Homo sapiens
gggaagcggcggcaggcgccatgtccggccgcgaaggtggcaagaagaagccactgaaacagcccaagaagcaggccaaggagatggacgaggaagataaggctttcaagcagaaacaaaaagaggagcagaagaaactcgaggagctaaaagcgaaggccgcggggaaggggcccttgg

SEQ ID NO: 590 - DNA, 231 bp, Homo sapiens; identical to SEQ ID NO: 221

SEQ ID NO: 591 - DNA, 477 bp, Homo sapiens
aagaaaatgccctatttgcaggggtataatcaagggtactgttcgtacatttctctcttaaagaaaaatagtctatattttaacctgcataaaaaggtctttaaaatattgttgaacacttgaagccatctaaagtaaaaagggaattatgagtttttcaattagtaacattcatgttctagtctgctttggtactaataatcttgtttctgaaaagatggtatcatatatttaatcttaatctgtttatttacaagggaagatttatgtttggtgaactatattagtatgtatgtgtacctaagggagtagtgtcactgcttgttatgtatcatttcaggagttactggatttgttgttctttcagaaagctttgaatactaaattatagtgtagaaaagaactggaaaccaggaactctggagttcatcagagttatggtgccgaattgtctttggtgcttttcacttgtgtttt

SEQ ID NO: 592 - DNA, 376 bp, Homo sapiens
gtttcttccacctaccaccgtggctggtgccactctttactcagtggcaatgtacggtggattagttcttttcagcatgttccttctgtatgatacccagaaagtaatcaagcgtgcagaagtatcaccaatgtatggagttcaaaaatatgatcccattaactcgatgctgagtatctacatggatacattaaatatatttatgcgagttgcaactatgctggcaactggaggcaacagaaagaaatgaagtgactcagcttctggcttctctgctacatcaaatatcttgtttaatggggcagatatgcattaaatagtttgtacaagcagctttcgttgaagtttagaagataagaaacatgtcatcatattt

SEQ ID NO: 593 - DNA, 526 bp, Homo sapiens
ccagtcaaggttgaaacggccattttgttatttctaacttctgctctagggttcagaaatgattttgcatctgatcattcaagatgagaatttgtttcacctgtacctgacagaataaaatggtaaattagcaatcagatcaccctttgtcaaaagaagtatgttctaaatgtatacactacaaactatctaataaatgatatctgcatactacatatttcatgttttattatgcaccattttagtggggaggaaaaacttcacagggatttattcaaaggatataaataatatcctaagaatgttgatttatacatatgagttctgtattaactgttaagtggtcatcttagctaaactataacaagcccctataatgtaaaagctgactcgaaaggcaccatgtaaagcactgaaatccacaatttagctgttatttcctcttccccaatacaaaattatctggtagtcttcactgttgactccatgataaaatgttccaaattcagactgctttaccgacaaa

SEQ ID NO: 594 - DNA, 447 bp, Homo sapiens
ctgcaggaactgtggggaggtaagagcttaggccacgtcccaggccccagagtcctcagccccagtcttcagaggccctcagggagccctcactaggacacgggagacagtcccaccccatggcctccagtctgaagagggaggtccagcccctccctaagggagcccacagtctgtgacatctcaggtgggaggaaaaggccctgtattcagggaattccaacttgaggagagaagcccagtctgaggccagagacccagaccctaccctctctgtctcacctccaggtctggggtctgcagatgatctacaagtcagtgaagctgccagtgctcaaagtccgcagcatgctgctggagacccctcaggggcggatccaggccaaaaagtggtcccgcgtgcccttctccgtgcctgactttgacttcctgcagcattgtgccgag

SEQ ID NO: 595 - DNA, 618 bp, Homo sapiens
  misc_feature 569: n = A,T,C or G
aaaaatataaagatgcagtatcatttctgatataaagttacttaaaaaaatccaaggtcttagggaattcacaaatcataactagaagtaacttttattaatttaatgtacacataattaccaaattttaatacattaaaaatgtgtaaatgcccacagactgtacaaaaattaacaccccattttgttaaaagttcccaaccacctcccaccataaatatacaaaaacctatttttagatatgtcaaaattgcatgcatgaatattttctaaagcttgaattttgctcttcactggataatgttatctatagctgtttctgtaacagactacataaacattgatatattatttaccatgcctttgaaactgtgcaggactttcataaacatggggaacaaaataaatagagtaaaaactgcaacagttttgtttagatgcaagtgcaattgggaaagctttcgaatttcaggattataaaactactataaaagtatttattctgttgttggcttagccacttgtattcaagcattatttgcagcattgctttacagcagttggtgctngaagatacaaaacatatagttaccactatttatacttgagggagaaaaa

SEQ ID NO: 596 - DNA, 378 bp, Homo sapiens
aaaaacatcacttctttatttcaaaggaaaaataaaagaccctcccaaccctgtccaaaaaaacccaataataataataacaataataaaaaatcctattagaaaccataaggaagcactgagagtttgagtattacattcttcaagtatgctgttcggatttttatttttaggttggtaactatacacatataaaaaaaccttaaaagtgcggccaagggattttgcttaaaattaagtatttagagggctacttaaaaatactgtagtaggactgtgcagtgatcctttgggggatgatgctttcacttttgtatcctcgtcaaggttaaggggcaggttcaaaagtgatcatacttccaggattagcgtaagtgg

SEQ ID NO: 597 - DNA, 373 bp, Homo sapiens
aaatgatcaatttagaagcttaaaagtatctttgaaactaaagttgcttttcttaaaatgaatgctgatttaacagttcatagacttggagcattatcactaggagacggaggcactactgccactaacgagaaacagcatcaccagaggataattacatggtacaaaatgcccaggggcctgaaactcactattaatataattttggcagcagcatcatttgaaagttaaccatttattacataatattaacacaccagcttcaaagaagtgcactccctttaggacactcgggagctacaaatgtattgtgattgcataattcgtattgcacagttttataaaaaacataaatactggctattctagtttt

SEQ ID NO: 598 - DNA, 245 bp, Homo sapiens
ccaaatgcgtagcgggcccagagcttgggctgcacatcggagcattcgcggattaggatgggtaggtcgggattcgccttcttcagctccacgtagcgtttctcaatgaagtccctgacgccctggctgccgggcgagcgctgacataagtggatgcgaatctcgcgcaggcccagctttgccccgactcctcgacttgctgcggccgccgccatccttgttaatatcgaagtcgccaattccag

SEQ ID NO: 599 - DNA, 542 bp, Homo sapiens
aaaaatcttcaacagaccatgctccctgtaacaaaaccttccaaaccctgtgttttattatacaaagcaatctacattagtaggtaaaaagaaattctcaaatttagcaatgtcattttccatccaacatccatctaatttacagatgggtttccactattcatactggaattagaattctgtaataaattttttctaatgttttctgtacatattaaataacccaaaaggttcctcttgtagtgcatgtgccatttagcaagtctattcagtatttttccagtaccattctcattacagtgatttgcctgtaaatgtagttaatatctaaaagtgcacacagttaactttcccaaataacagactatttctggaggaaacctaatattcacagaaaagattaccaataacaatgattagaaatgtagggttagaatgtactctgagactatacaacacaattatatacacaagctaaaggacattaagtctttagcctatatttacataaaataatgtgtgtttccacagggtcataccaa

SEQ ID NO: 600 - DNA, 446 bp, Homo sapiens
aaaaaacgaaagcatttcatcaaaacaaaaaactaacttcctcacaggaagtccactagtaacaggtattaagaggccaacacattcatttacataattgctacagtttcatttcttaacttttgctgtaataattatgcaccaattgctggtcagagactcagttggataaaacagagcagtgggctaaatccattctgctatattttcatctagttgatcagagcaaatatctacgatcctcttttggctggattgtggctgctcagatcgcacttccttggtgaaagcatagagtgtcccagatgggcctgctccaaaacacgctcatctagaaagcagcacaccacggggggtgggggagaggttggggagtgcagcagcagcaaagattacaatttatcttgcaattttagtgatgtcacctatggcctctggaagaaaaa

SEQ ID NO: 601 - DNA, 385 bp, Homo sapiens
ccactagctgaatcttgacatggaaggttttagctaatgccaagtggagatgcagaaaatgctaagttgacttaggggctgtgcacaggaactaaaaggcaggaaagtactaaatattgctgagagcatccaccccaggaaggactttaccttccaggagctccaaactggcaccacccccagtgctcacatggctgactttatcctccgtgttccatttggcacagcaagtggcagtgtctccaccacctatgatggtgatgcagcccctagaagtggctttcaccacctcatccatgagagctttggttccccgggcaaaagcttcccattcaaatacccccacaggaccattccacacaatctgcttagcccgagtgacagc

SEQ ID NO: 602 - DNA, 289 bp, Homo sapiens
aaaaaccatctagatactgattttttagcattacaaaaaattgagaggcacaattgaagtatccaaataaattgtgaggggtggaggtggggactatgctcactatctatgttgttccttagtcacttaaaggctctgcgtgcaagagtctttacatgaggcagtagtgcactttcatttagtaggaataaatcacataaaatatatacttttatacagaaagtgttattgtgttgtcattttcaattacttataaaaacttcatttgaattgcacaaaagttctcttt

SEQ ID NO: 603 - DNA, 71 bp, Homo sapiens
aaaaaattatattaatagagacttgcaaccaaccagtaaaaaggttactttcttttttttttttttttttt

SEQ ID NO: 604 - DNA, 542 bp, Homo sapiens
ctgcagaggggatcgtggtgaatttcaatgaaaatccatttgaatcttgaggttcagatcttaaaaaagcaaaggacatgagagaagtaatattgttgcttgaaatttcattgcttatatctaaaagaaactcctatttttaagagaaatgttgaatctttgcaacgtggtagacgctcccacaaaactttctcctgaaataggagataaatgttggaaagaggcaatgtattgagtatgctgatagaggtggagttcagagacaggcaagcatacataagagtcaggatgtttttcagtattatctttacaaatgagtttcttacagtggtcaatgacaaaccaatttcattcaaagcttgcttcaataggcaatggtttgatgccaatatgttagctatttactttgaccaccgtatgcattaaaaagaagaaaaattaagaatactcaagcagaacctccaacttagatagcactttccacaaaaagtaatggagggatagactgaagttaaatgggatcaggtatgtgatgagatctc

SEQ ID NO: 605 - DNA, 440 bp, Homo sapiens
ctgactgtcctctccagaaggctcttctgagctgagcaggagaccccagggccacagccgagccccaacctagacacggtctgagctccaaccttggctggctatacttcaagggcgggtagggccggcatggggctggagggagtcagcccactattgcagattccacacaaagaaggagggggcttgggtggtagcactggacatccatcccatgtgcctgggagtcttggggttggagccacagagaaggttacatcggggtgctgcggaccttgccttcctcctcgggcacattctcataggcattctcatgctcactggacctgaaactggccgccatcgaagagtaccttccatctgttcccaccaggactccatctgccttgtttccgacggtcaggatcatgtgtgcaggctccggctcctcctggcaccag

SEQ ID NO: 606 - DNA, 277 bp, Homo sapiens
aaactgcagcctgatcaaatgtttcaaaagttgttcaaaagtaatcttagtccaacactgctcctctgacttttatctagagaaatagaaaagtttatatattaacgatttgtttcttttaagtacttgtgtacatttttctcttgcaataagtattaataattgaaaattattaaattgtcattttaatgttttttattaagtaagtttgatatgtttcttagcaacgaagacctgtggctcaaataggagcaaacaattcatggaatcaaatttt

SEQ ID NO: 607 - DNA, 510 bp, Homo sapiens
aaacatgcaaaataactgacaataatgttgcacttgtttactaaagatataagttgttccatgggtgtacacgtagacagacacacatacacccaaattattgcattaagaatcctggagcagaccatagctgaagctgttattttcagtcaggaagactacctgtcatgaaggtataaaataatttagaagtgaatgtttttctgtaccatctatgtgcaattatactctaaattccactacactacattaaagtaaatggacattccagaatatagatgtgattatagtcttaaactaattattattaaaccaatgattgctgaaaatcagtgatgcatttgttatagagtataactcatcgtttacagtatgttttagttggcagtatcatacctagatggtgaataacatattcccagtaaatttatatagcagtgaagaattacatgccttctggtggacattttataagtgcattttatatcacaataaaaattttttctcttt

SEQ ID NO: 608 - DNA, 464 bp, Homo sapiens
  misc_feature 454: n = A,T,C or G
ctgtaggtgaggtcagaggtcagggtatgaaagtgccggtgtgtgtgaatggggagctgggcagaggcaggctgttcagaagatgccccctcctccccactcaaccaggtactgcacagagccatcaggccgtactctccgagcaaggacccggacagggtcccctcgggacaggtaaccaaccccacctcggactcctcccccagtcccaggagacaaactacggcacaggggagaagggggtgctgagcgtctaggaagacctggggatggggatgaaactgaggaagatgaggcagtcatcgagtggggggcacttttagggatgtctgtggggaaaccaatgtgaagttccaggggtgacctgtctgggggtccactgtccccagaggtccctgcggtgctggcagaagggtggaaggaagcaaacattccggatggggctgctgggcangcagcgggca

SEQ ID NO: 609 - DNA, 501 bp, Homo sapiens
cctctacttggtctggtcccagttctttaagccccagaatggacaaccatgtgaagcagctcaggtcaactgcagggccacattcccacactgcaaacccctccacccaccctcaactcacacacaccctggatcagcaggtctaggctgaaagagagaacagtgaggttcccagggtggcaggtgggtatgacaggcaccataccccaacctgctcaaaaccctaagttagcaaaggaagacagaagactggcttgcctgcccattcccctccccccacccccaacagcagcctcacatccctgatcagtaacactgtgattctgaggtgccaagaggaggggcttaccagcccctgggtgattactaccaaacggcccagaggccagagagagagggcaggaatttgccccactacctgctcagtattagccaagctgctgccttcagcttgtgcctgtgggtgcctccagcccctctcccttccagaacaggtatggc

SEQ ID NO: 610 - DNA, 292 bp, Homo sapiens
aaaaaaaaaaaccacataacaattctttgaagaaaggaagggattaaataatttttttccctaacactttcttgaaggtcaggggctttatctatgaaaaagtagtaaatagttctttgtaacctgtgtgaagcagcagccagccttaaagtagtccattcttgctaatggttagaacagtgaatactagtggaattgtttgggctgcttttagtttctcttaatcaaaattactagatgatagaattcaagaacttgttacatgtattacttggtgtatcgataatcattt

SEQ ID NO: 611 - DNA, 510 bp, Homo sapiens
  misc_feature 42, 47, 93, 118, 126, 134, 186, 216, 244, 282, 285, 291,313, 326, 331, 336, 361, 405, 435, 443, 474, 477, 481, 486: n = A,T,C or G
gcttttttttttttttttttttttttttttttcgaacacaanccggngatactttattatataagagagttgtcaaaaggacagtttcatttntgtttcaaaatccccacattccagngatccatntgttgacncaattaacataaactatttgctgatatttactgagtgcttgcaatgtatcanagtcattaaataaaatgcaacttctactgngaaaactggaatcttcattaggacacanacttaaaaaaggcccagtttcaaggattctgacttgcncanactgancactcccatttccaaaagttcnaatacctcctttnttatntcggnaatgtccatcattctcctcaacttntgatctctccagttccagccaaaaaccaaaaattttaaggggcncaaattaaggccaccttgtttaacaagttntttaattntccccggagttcctacacccaggtgcaccanacncttntccancaactttacctgcgcctggacctt

SEQ ID NO: 612 - DNA, 204 bp, Homo sapiens; identical to SEQ ID NO: 405

SEQ ID NO: 613 - DNA, 550 bp, Homo sapiens
  misc_feature 444, 546: n = A,T,C or G
aaatccagaaatctttgtactgatgtaaatgattgtagttattttggatagtgttttgctaacaaaaggagagacttttttcatgcatatttctattttgtttttttgggttttattttattttaatagtagtaaaatacttggaataatttttcatattcttgtcattaatattattttgtatttttatgtggaaatatataattttatgacactaattgctaaagtttattttatgttgaattatttttggagctgaaatctttgtaatattaaagcaactagtttctaattcccagtttctgtatagaatcgcacaagtggtttatggagtgtttggattgtaattataaatggttctttgatatgcaaattaatattttcagttgattttattttatattcctaatggggtgttaaagccgttttttatttttttctaanaaaaagagaacccatgcttttatggacactaggtaaacaccttcagcttaaatttttcgttaaatattttagtttattttattggtatcttccaggtgtctnaatc

SEQ ID NO: 614 - DNA, 278 bp, Homo sapiens
aaaaaaattattttcatagaatacattttcacattagagattcccattgtgcgaaaataacaatttattacttatagttttatatttgtggacagattgttttagaacaagtagaatacatttgggaattaaatctcaatttacagttggtagtattttgatacatctacggggaaacttgcccttaaatggaacttctgtatattcagaagcactccaagcgtttcttcctaggatttagaaatttataatatgagctatcagcatttcctaatttt

SEQ ID NO: 615 - DNA, 496 bp, Homo sapiens
ctctctcttgctctcttatttgtaccggttttttgtatataaaattcatgtttccaatctctctctccctgatcggtgacagtcactagcttatcttgaacagatatttaattttgctaacactcagctctgccctccccgatcccctggctccccagcacacattcctttgaaataaggtttcaatatacatctacatactatatatatatttggcaacttgtatttgtgtgtatatatatatatatgtttatgtatatatgtgattctgataaaatagacattgctattctgttttttatatgtaaaaacaaaacaagaaaaaatagagaattctacatactaaatctctctccttttttaattttaatatttgttatcatttatttattggtgctactgtttatccgtaataattgtggggaaaagatattaacatcacgtctttgtctctagtgcagtttttcgagatattccgtagtacatatttattttt

SEQ ID NO: 616 - DNA, 230 bp, Homo sapiens
aaaccatgaagagccgtttgacagagcatgctctgcgttgttggtttcaccagcttctgccctcacatgcacagggatttaacaacaaaaatataactacaacttcccttgtagtctcttatataagtagagtccttggtactctgccctcctgtcagtagtggcaggatctattggtatattcgggagcttcttagagggatgaggttctttgaacacagtgaaaattt

SEQ ID NO: 617 - DNA, 367 bp, Homo sapiens
ccttttacagatgtcagctttcactggcctccatgcacaacctcccactaccacccaatctgcctgccacagcaaagtgcaggcaccctgggccccctggaggatgcgggcaggggctacagggcatccaggatgtggtcgatcttggtgaccagctcctggcgctttcctgagatgagcttctcattctcaatgtacgtgtctttcttgagcttgccagccaccaggcgctcagcctccaccgccgacttcagcaccagctccttgacctgtgcatccagcttctgcatttcgctcactctgtcgcacagatcagagccctctgtcttcagcctggactgcagcagtgcaatctcactggtcaagg

SEQ ID NO: 618 - DNA, 185 bp, Homo sapiens
aaagatagatccttttataggtgagaaaaaaacaatctggaagaaaaaaaccacacaaagacattgattcagcctgtttggcgtttcccagagtcatctgattggacaggcatgggtgcaaggaaaattagggtactcaacctaagttcggttccgatgaattcttatcccctgccccttccttt

SEQ ID NO: 619 - DNA, 279 bp, Homo sapiens
  misc_feature 33, 35, 37, 68, 74, 105, 142, 170, 185, 192, 217: n = A,T,C or G
caagctttttttttttttttttttttttttganananaaagcaacttttattgaactggtgctacttnttgcanagcagggctaacctataggcagtgtgcccanagtttgtgcctgtgggctactagctagttgtatttanagccacttttaattgcatgccaattaanaggtaggttattcanaactttntgggaaaggggcagggagtttccanaaccatataaagtaacttccaggccattgccaaggtgtgttgccatgacatttgtaaactgg

SEQ ID NO: 620 - DNA, 286 bp, Homo sapiens
cctagaaaaatgcctggcacagaagcacttactaaatatttgttaaatggatgaataaactatgtgaccagaattccttaatactgggtccgagactagaaagtgggagttactggtttggttttggcacttgtttagtcagcttgtgctgccataacaaaacaccacagatggattggttaacaacagacatttctttctcacaattctggaccctggaaatctgaggttagggaaccagcagattcagttcctggtgagggccctcttcctgcctggcagacag

SEQ ID NO: 621 - DNA, 443 bp, Homo sapiens
ccagggagtccttttctaactgagcctatttttctcttaggtacaaatggaataagtgacaaactctaatttgtagaaacattttaggccatgtataagttacactgattttagcactaagctatatttttatcacagatgggtcaccttaaaagaaaactaaggagatggaatgaatctgaaatctttctaaatacaaggtagttaacaccatactcaagcagaaattataatcctgtatttagagatactttttttttgagacagagtctcactctatcactcaggctggagcgcagtagcgtgatctcggctcactgcaatctccgcctcccaggtattaagcaagtctcgtgcctcagcctcccaagtagctaggattataggcatgagccaccaagcccagctaattttcatatttttagtagagacggggttttgcc

SEQ ID NO: 622 - DNA, 557 bp, Homo sapiens
  misc_feature 529: n = A,T,C or G
gttacccactgccagatgctgcaagcgaggtccaagcacatcttgtcaacatgcattgccatgaatttctaccagatgtgcttttatttagctttacatattcctttgaccaaatagtttgtgggttaaacaaaatgaaaatatcttcacctctattcttgggaaacaccctttagtgtacatttatgttcctttatttaggaaacaccattataaaaacacttatagtaaatggggacattcactataatgatctaagaagctacagattgtcatagttgttttcctgctttacaaaattgctccagatctggaatgccagtttgacctttgtcttctataatatttcctttttttcccctctttgaatctctgtatatttgattcttaactaaaattgttctcttaaatattctgaatcctggtaattaaaagtttgggtgtattttctttacctccaaggaaagaactactagctacaaaaaatattttggaataagcattgttttggtataaggtacatattttngttgaagacaccagactgaagtaaacag

SEQ ID NO: 623 - DNA, 565 bp, Homo sapiens
ccaaagtgtaattggtctgcagatgggaaccaacaaatgtgccagccaggcaggtatgacagcttacgggactaggaggcatctttatgatcccaaaatgcaaactgacaaaccttttgaccagaccacaattagtctgcagatggacactaataaaggagccagccaggcagggatgttagcaccaggtaccagaagagacatctatgatcaggagctaacattacagccggtggacaactcgacaatttccctacagatgggtaccaacaaagttgcttcccagaaaggaatgagtgtgtatgggcttgggcggcaagtatatgatcccaaatactgtgctgctcctacagaacctgtcattcacaacggaagccaaggaacaggaacaaatggttcggaaatcagtgatagtgattatcaggcagaataccctgatgagtatcatggcgagtaccaggatgactaccccagagattaccaatatagcgaccaaggcattgattattagatccacacagaaggagctcagtatttagtcctttgtttttattcagtgagaacc

SEQ ID NO: 624 - DNA, 179 bp, Homo sapiens
ctgcccgcagactcgggaggtaggaggactggccgggcagtgtgctgggccctgccctgaggagacagaccaggtggctacaggatctcctcccgcgggctcctggccttcagaggggtctgcccgttgggtacagagccattctgaccatgcaggagtttgcccttctctcggtctgg

SEQ ID NO: 625 - DNA, 436 bp, Homo sapiens
ctggggacagcagcctcaccaacacagcaccaacagcttccaagatagtaacagatgtatgacctgccatattcagtaagaactgagattggaatatttaatgactccaattccagggtttcagaaccgcatcgcagcatctttcctgaaatgcactcagactcagccagcaaagacgtgcctggccgcatcctgctggatatagacaatgataccgagagcactgccctgtgaagaaagccctttcccagccctccaccacttccaccctggcgagtggagcaggggcaggcgaacctctttctttgcagaccgaacagtgaaaagctttcagtggaggacaaaggagggcctcactgtgcgggacctggccttctgcacggcccaaggagaacctggaggccaccactaaagctgaatgacctgtgtcttgaag

SEQ ID NO: 626 - DNA, 489 bp, Homo sapiens
aaaatgtggcaattgggaagtacagtacatgcttccctgtggcttgggggtgtgtagttggggccctaattcttgagccagtcaagagacacttgggatttagccctcaattgcagcactgaggcactggtgccgagaaacaatcctgagggggtccccaacccacctagtcactccttagtttgcagaggcactatctgcagagtcctgtgaaaggctgcagtgaagtcttgcatgagactccccatccagcggagttctccaagctgcagggtagagcgttgtgccaggagggtgtttgggctcatgaaacagtggagagacgcagaggctcactgggaaaccttggcctcaccgggcctggattgggcatcggcagtgggcatgaagtgggggtgggattctttaggccagggtccaggacacttgagggatcgtaatgctgggggttttcggggaggaaccaagggctcacggagcctcctgtgc

SEQ ID NO: 627 - DNA, 443 bp, Homo sapiens
ccactgggtgccacccagcctgtgtgccctccctggggctgaggaggcaggcggctgctagttgtggcccttcctggaaggagaggctgatatgttttcatgaataaatattgtcagccagaaaaggttggtgtcaggtaatgcatatttttttaagctttgttttatatttatttttcatttagtttttattgggaatggttttcaaagaactctcagttctgcctaggtgtttttgggggagccctgttttccatagtgtaattccatttaagaggttgtctaaaagtctttttaattaatagaaagattttaatatccaagagtagtcaaattaaggatataaactttccacaccttcctgtcgtgacagataaaagcacagaaaggacaacccttgaaatcatgtaacgttggtcatttcaatattttgtacctgtttt

SEQ ID NO: 628 - DNA, 463 bp, Homo sapiens
  misc_feature 413, 432: n = A,T,C or G
ctggcgcggaagagggaagtgcggctccttcgaagacaaacaaaaacatctttggaagtttctttgctagaaaaatatccgtgctccaagtttataattgctataggaaataatgcagtagcatttctgtcatcatttgttatgaattcaggagtctgggaggaagttggttgtgctaaactctggaatgaatggtgtagaacaacagacactacacatctgtcctccacagaggctttttgtgtgttttatcatctaaaatccaatccctcggtttttctctgtcagtgcagttgctatgttgcagaagatcaacagtatcagtggctggaaaaggtttttggctcttgtccaaggaagaacatgcagataactattctcacatgtcgacatgttaccgattataaaacctnagaatccaccggcagcctnccttctcctttcctgagagccctaaaaacac

SEQ ID NO: 629 - DNA, 449 bp, Homo sapiens
aaaacaattcgaagatggcagaaccccgttataaatgggtacactataccatagatataaggcaaggaatcccaattactgatttttttgaatggcctttatttggctatatcattgatagtctatggtgtggaatttttggacacctaccagaacacatattaccataagtttccattttatcaggttctaagaaactttatttttgaaagaaaaaaatggacaagaaagaaaaatgtttctaaaagtgttatctgtgtataaataaagtggctgataaattagtgaaaaggaagaagtttggaaagcagaagtttttatgttgtataaaaagaaatacagtgaattcacattacttaagactgataatagattattgttgtgggtaaatgagtcattttatctgttgcatacttacgtgaaggctttcaaaaggtcagtaataattt

SEQ ID NO: 630 - DNA, 422 bp, Homo sapiens
  misc_feature 292: n = A,T,C or G
ctgcagaggattggggagtcagaggactgtgcgggaatcgtgtccttcctgtgctctccagatgccagctacgtcaacggggagaacattgcggtggcaggctactccactcggctctgagaggagtgggggcggctgcgtagctgtggtcccaggcccaggagcctgagggggtgtctaggtgatcatttggatctggaggcagagtctgccattctgccagactagcaatttgggggcttactcatgctaggcttgaggaagaagaaaaacgcttcggcattctccttangacttatctgcttgtagatttggctgatccaattaacatgtggggttcttggtgtgggtctggggagctgaaggattttatggagctggtgctttggaggaatcttaagggaaaggagtagaagctcagg

SEQ ID NO: 631 - DNA, 143 bp, Homo sapiens
cctcaggcggcccctcccacaggcccagctcagaccagattacattcaacatcttgatgtcaggaaatggctacgtctggaggccaccgggacccccccgtgaagacaggacgcctcctccgagaggaggtgagtcagcattt

SEQ ID NO: 632 - DNA, 385 bp, Homo sapiens
  misc_feature 313, 325, 354, 357: n = A,T,C or G
attactggtaggaacttgagaactttatttccaagttgttcaaacatttaccaatcatattaatacaatgatgctatttgcaattcctgctcctaggggaggggagataagaaaccctcactctctacaggtttgggtacaagtggcaacctgcttccatggccgtgtagaagcatggtgccctggcttctctgaggaagctggggttcatgacaatggcagatgtaaagttattcttgaagtcagattgaggctgggagacagccgtagtagatgttctactttgttctgctgttctctagaaagaatattnggttttcctgtntaggaatgagattaattcctttccaggtnttngataattctgggaagcaaaacccatgcc

SEQ ID NO: 633 - DNA, 465 bp, Homo sapiens
cccgtgttctcacagttattaaccagactcagaaagaaaacctcagggaattctacaagggcaagaagtacaagcccctggacctgcggcctaagaagacacgtgccatgcgccgccggctcaacaagcacgaggagaacctgaagaccaagaagcagcagcggaaggagcggctgtacccgctgcggaagtacgcggtcaaggctggataggtcagccttttgaattgtagtcatcctagtgggtacatggagattttattcacagtctaatttgcttttccttgagaatgagagataattaacgaagttgagcccctgttcatgtccactgttcattaggatatcttctttgggatgagactgtttaagacttttcttctatttctagtgaattgtccttttttctttacttggagactttttcacatattccattcatgtgtgtatacatatttaatttttt

SEQ ID NO: 634 - DNA, 324 bp, Homo sapiens
aaaaagaaatctggtcttgttagaaaacaaaattttattttgtgctcatttaagtttcaaacttactattttgacagttattttgataacaatgacactagaaaacttgactccatttcatcattgtttctgcatgaatatcatacaaatcagttagtttttaggtcaagggcttactatttctgggtcttttgctactaagttcacattagaattagtgccagaattttaggaacttcagagatcgtgtattgagatttcttaaataatgcttcagatattattgctttattgcttttttgtattggttaaaactgtacattt

SEQ ID NO: 635 - DNA, 484 bp, Homo sapiens
ctgatttttatttttcttcttgattctcttctacagtttccaaattctctacaatgaacatgtacttctttttaatatcaaaagacaaaagaattggtacgtaaaaagaacatccttcccatcttcaaggtcaagattgaacgctgactcctgcaggaagtcttccaggattcccaggcaggaatgatggctccctgtccctgtagctccaggagttcttgcttcacgcacgcctcacataccagactgaatgttggcaggaggagtgaccaggtcggtcatctgtgtccctaccacctacaacaggccagcaatctacccgtgtgtgtttgttggaccgaattaaccatgatgggcggccgagggcgcctggagctatttgggggcttggagagaacctcttaggagagtgtcaggccctaggccagtgtcaccagaggaggtcagtctcagtccttggagtggtgggatggaaaccagacgg

SEQ ID NO: 636 - DNA, 229 bp, Homo sapiens
ccacacgtccaaaaccaatcaggtcaactcgggcggtgtgctgctgaggttgcaggtgggcgaggaggtgtggctggctgtcaatgactactacgacatggtgggcatccagggctctgacagcgtcttctccggcttcctgctcttccccgactagggcgggcagatgcgctcgagacccacgggccttccacctccctcagcttcctgcatggacccaccttactgg

SEQ ID NO: 637 - DNA, 471 bp, Homo sapiens
  misc_feature 459: n = A,T,C or G
cctccaaggtgatgggcggcaggtaacgagtcattgcctctcacgccacctggaaggctggactacttcctcctcccaactgcggggtcccagaaatcctcgggtcccagtggctgacttacaatattcaattcactctggccaaacttcctatgagaaaatccacggtgagccaaaatgaaaagtacaaggcagtagtacaggaacctggcagccgcactggccgcccagaaacgtcagtggtgctgccccattcggcgaaaggttagggagcaggaaaagaggaagcaggagagggaaggaaagtcccatggaatatgtatttcagaatccttacattttctcagccaccgctccccacgtgagttcccacccccaccccgacaagagcaaagagttctgaggatccaagaacgtgaccgggtcagacaggttcagctactgagttcacgttccagncccagacctcgg

SEQ ID NO: 638 - DNA, 489 bp, Homo sapiens
ccaagggtatggaaagctttcacaatgcatgccgagtgtgaagtgacacccccagcagatggggtttatcatctttacttagtcacacaacatcaaggactggttagttccagggaagggctccatttcattacctgggtcagttctcttcccccgcatgctccacaatgcagtagaaccaaacaacacattcatttacaatagaatgtttctcatttcactcttcagtgttcctgttatttatgaacggcatcaggcacagatagatcattatctaggacttgcaaataagaatgttaaagatgctatggctaaaatccaagcaaaaatccctggattgaagcgcaaagctgaatgaaaacgcccaaaataattagtaggagttcatctttacctgcccgggcggccgcccgggcaggtccaggctggtcttgaactcctgacctcaagtgatccacccgcctcagcctccaaagtgctgggattaca

SEQ ID NO: 639 - DNA, 345 bp, Homo sapiens
ggctagaacactacaggggatgaattcttcaaataggagccgatggatctgtggtcctttgggactcatcaaagccttggtttagcattttgtcagttttatcttcagaaattctctgcgattaagaagataatttattaaaggtggtccttcctacctctgtggtgtgtgtcgcgcacacagcttagaagtgctataaaaaaggaaagagctccaaattgaatcacctttataatttacccatttctatacaacaggcagtggaagcagtttcagagaactttttgcatgcttatggttgatcagttaaaaaagaatgttacagtaacaaataaagtgcagttt

SEQ ID NO: 640 - DNA, 266 bp, Homo sapiens
ctgcttttctaacaaactgttgatcagcaaaaataaaggggctacagaaacactcatttttatgctgttccctcttgggcttcatgcaaagacaattctgtgtaaatgtacagttgactctgatttggaaatatgaaaatcagtccatccttgttataaaaaatttttttacaattgtaattatattgatgttcatattgtgtaaaataactcatttaataaaatagtactttgatttacgacatcacaaaaaaaaaaaaaaaaaa

SEQ ID NO: 641 - DNA, 470 bp, Homo sapiens
aaaaaatagtttcttcttttatgtggattctcttaagatttgaagaaccaaactattctttggttttattatacgggaaaaacaacacgcagtctagttaaacaactttgtgatatttatattccatcgcacagatatgggttatacaaattagtaacacaagttatttcttaaattccaaacattttctaaaatattattacagcagatgcctaggatattaaaacataaaggtggaaatcattctctaaatagttaaatatatttgacactgaaaatactgcacattttaattagaggaaaattaaaatgtgtgctcaaatgcactaacaaactaggtagcagggcaactaacaactacaaataagtcactgtggtccatttttacgtatgcatatatatgattattctctagataatccgtcttcttgaaaatgctaataaaacataaaaatccagataaatgattt

SEQ ID NO: 642 - DNA, 493 bp, Homo sapiens
ccttgcttctctttacttttccactctaggccacgatgccgcagtaccagacctgggaggagttcagccgcgctgccgagaagctttacctcgctgaccctatgaaggcacgtgtggttctcaaatataggcattctgatgggaacttgtgtgttaaagtaacagatgatttagtttgtttggtgtataaaacagaccaagctcaagatgtaaagaagattgagaaattccacagtcaactaatgcgacttatggtagccaaggaagcccgcaatgttaccatggaaactgagtgaatggtttgaaatgaagactttgtcgtgtacttaggaagtaaatatcttttgaattagagaaagtgttgggacagaaagtactttatgtaactaagtgggctgttcagaagcttagaggtcattttttgtaattttctttttaattactttagagagctagggatgcaaatgttttcagttagaaagcctttatttac

SEQ ID NO: 643 - DNA, 287 bp, Homo sapiens
aaagtcagctatgatcttgacaaatattacgggtaagtctgtagcaagtttctaatttctgagatacaaaagacaataaatacagattaaaattcagcctacaaacaagattctacatctaattactggtaccgtagcttagtttcaatatttcaaacatatgtataattcttaagatgctacaaaaactcatataataaagttattgttcactgacaaccaactaacagttcttcactgacaatatacaagtgtgcagtgccttcgagccttcaggtgagcccccc

SEQ ID NO: 644 - DNA, 446 bp, Homo sapiens; identical to SEQ ID NO: 600

SEQ ID NO: 645 - DNA, 510 bp, Homo sapiens
ctgttggcattgtgtttcttacttagttctcccaaggaaaactcttaaattgaatcttcagcagaataatccttaaatatactttgtaagcaaaacaaaagcttttttgtttacatagttctttggattttactgttcctaattttattctgaaactcaattttaccccagaccataattaccatattaactttgtaatgcacagttgtatgcaattccgcaaagcagtagtataccatcaggctctattcacccagagcataggaaaaacaggattggtcacacccattaagaaacaaatctatcccacgctatttgccaatgtgtagtttcagtctaaattctgacaataaaatgtatggatatatatctatatatctcatcttgattttcaaaagtagccaaagggagttcttcagagcttagcgttgcctggctgaagctgaagattttgtaacttcatagcgagacccatgttgccagtgattttcaatttgccttgaaagaagg

SEQ ID NO: 646 - DNA, 232 bp, Homo sapiens
ctgggcaaaagtcttctaacataagcccattttgtaaggaagcattgattatctcatgtactgcatatcactagcctaggaaaagatcgaaattcaaggtatagtcatgtactacataatgatgtttttggtcaatgatggaccacatatatgatggtggtcccgttaagattattagggagctgaaagattcctattacttactgacaacataatgttgtagtgcaatttt

SEQ ID NO: 647 - DNA, 345 bp, Homo sapiens
aaaccctgcgtggcaatccctgacgcaccgccgtgatgcccagggaagacagggcgacctggaagtccaactacttccttaagatcatccaactattggatgattatccgaaatgtttcattgtgggagcagacaatgtgggctccaagtagatgcagcagatccgcatgtcccttcgcgggaaggctgtggtgctgatgggcaagaacaccatgatgcgcaaggccatccgagggcacctggaaaacaacccagctctggagaaactgctgcctcatatccgggggaatgtgggctttgtgttcaccaaggaggacctcactgagatcagggacatgttgctgg

SEQ ID NO: 648 - DNA, 491 bp, Homo sapiens
ccttatcacactgtaagtggtccaagcccatagggatgctctttttggttcctggaatttccagttggatgtgacagagatctttcagtataggtctaagtcaagagtagcctctgggttgaggtgggctgggagattaacatcttacctggggtccttcagataaacctgttggtttttcctgtctcatacaggcccatcttaagttttgatgttgaattaaaactacttctacccccttagttataaaaaaggccacaaggagcatttatgtggatatctggaagtgagatagttattccattcccaggaaaagaaaaataaagctaagttacaaaactaaatctatatgcaataaagttattatatactgctttgtttaagcagagtcctctggaatttatgtacagtacattagttttcagctatttatattccacagttagaccttaagattctctggttttaagacaattggtaaagatactttt

SEQ ID NO: 649 - DNA, 257 bp, Homo sapiens
cctcttctgatctcaagggtcacaccccctcaaagatcctctcacccatggtagttgctgctcgtggttctgtctgtccgtgcaccgatgcacacaccgcaccccaccactgtactctgaaattggcgagtgagtggagagccagctctgcggagtcatcacgcagccatggttgtgcctgccgttcatggtggtctttcaggttatcttggcaacatgtacattgcttttattttttttctttctttttttttttt

SEQ ID NO: 650 - DNA, 463 bp, Homo sapiens
  misc_feature 413: n = A,T,C or G
cctccaaggtgatgggcggcaggtaacgagtcattgcctctcacgccacctggaaggctggactacttcctcctcccaactgcggggtcccagaaatcctcgggtcccagtggctgacttacaatattcaattcactctgaccaaacttcctatgagaaaatccacggtgagccaaaatgaaaagtacaaggcagtagtacaggaacctggcagccgcactggccgcccagaaacgtcagtggtgctgccccattcggcgaaaggttagggagcaggaaaagaggaagcaggagagggaaggaaagtcccatggaatatgtattccagaatccttacattttctcagccaccgctccccacgtgagttcccacccccaccccgacaagagcaaagagttctgaggatccaagnacgtgaccgggtcagacaggttcagctactgagttcacgttccagcccag

SEQ ID NO: 651 - DNA, 164 bp, Homo sapiens
  misc_feature 140: n = A,T,C or G
cctcatcttgtgaagttgaaattacagcattatttttattagagaaaacaagtgaaaatgagaaaaagtccttcaagctttggagttagttaatgctcagcctgtaaaacgattactaacaaataatcccagaggaaacntgggttctggtctgggccaatttt

SEQ ID NO: 652 - DNA, 367 bp, Homo sapiens
ggcggactaatcttcaactcctacatacttcccccattattcctagaaccaggcgacctgcgactccttgacgttgacaatcgagtagtactcccgattgaagcccccattcgtataataattacatcacaagacgtcttgcactcatgagctgtccccacattaggcttaaaaacagatgcaattcccggacgtctaaaccaaaccactttcaccgctacacgaccgggggtatactacggtcaatgctctgaaatctgtggagcaaaccacagtttcatgcccatcgtcctagaattaattcccctaaaaatctttgaaatagggcccgtatttaccctatagcaccccctctaccccctctaga

SEQ ID NO: 653 - DNA, 196 bp, Homo sapiens
cgcgggaggagcagttcaacagcacgtaccgtgtggtcagcgtcctcaccgtcgtgcaccaggactggctgaacggcaaggagtacaagtgcaaggtctccaacaaagccctcccagcccccatcgagaaaaccatctccaaagccaaagggcagccccgagaaccacaggtgtacaccctgcccccatcccggga

SEQ ID NO: 654 - DNA, 92 bp, Homo sapiens
  misc_feature 12, 13, 84, 86: n = A,T,C or G
ggcttgctgggnnccccatccaggacactgggagcacatagagattcacccatgtttgttgaacttagagtcattctcatgctntnctttat

SEQ ID NO: 655 - DNA, 396 bp, Homo sapiens
  misc_feature 14: n = A,T,C or G
caccaaagaaggcngcttctcatagggcacttgatgacattagtgaaagcatcaaagagcttcagttttaccgaaataacatcttcaagaaaaaaatagatgaaaagaagaggaaaattatagaaaatggggaaaatgagaagaccgtgagttgatgccagttatcatgctgccactacatcgttatctggaggcaacttctggtggtttttttttctcacgctgatggcttggcagagcaccttcggttaacttgcatctccagattgattactcaagcagacagcacacgaaatactatttttctcctaatatgctgtttccattatgacacagcagctcctttgtaagtaccaggtcatgtccatcccttggtacatatatgcatttgctttt

SEQ ID NO: 656 - DNA, 199 bp, Homo sapiens
  misc_feature 14, 15: n = A,T,C or G
ttaccagcaagaannaaaaagaaatccatatcttaaagaaacagctttcaagtgcctttctgcagtttttcaggagcgcaagatagatttggaataggaataagctctagttcttaacaaccgacactcctacaagatttagaaaaaagtttacaacataatctagtttacagaaaaatcttgtgctagaatacttttt

SEQ ID NO: 657 - DNA, 335 bp, Homo sapiens; identical to SEQ ID NO: 418

SEQ ID NO: 658 - DNA, 538 bp, Homo sapiens
  misc_feature 12, 13: n = A,T,C or G
aaataattacanngagtgtttgctttcaaatgccatgggttacacttttatgggcatgactataaccatttttgtaaagagtaagagttgtataaaataagaaataaatacagtactcaacttcctttcatattagcatcatcaaccctctaattcaccttatgggggaaatgcttctttttgtttgtgatagctattttatcatttccttcatatttttctcttataaaaatgtatttgatactgtgatatgttcacgaaaagtattctttaattattctttgttatagtagagctgttcattatggatatttctgctgccagtcacaatctaaattaattttggtaaaagattgggtacttagtttcctgttactgagttagctctactcttttggaccaaagcaacatgagagcaagtacttttcacacttgttaagatggagttataactgtcatacatttggaatattatgatcccaagtagtctttttataatttggattgtatcgtatgttagatttttgataaaatttgg

SEQ ID NO: 659 - DNA, 410 bp, Homo sapiens
  misc_feature 13, 14: n = A,T,C or G
taaagctgttggnnaagagggactcatataaatagttggattgcgttttgctttttatttctttataaaaatatgtcaaaaacagtttttaattttagaaatcttatacttgaaagaaacctcaattatcagtggctttatgaagtaaagttaaaaacaaacataggaaatgtgaaaatatttgtgtttgttttgtctgactaacttgctgctaaatgctatctttaggtgtgtgaaagttctttgatatgttattgtccttttacatcttgttaaatagccattgcttttgagaatcagatagtgtgttgtttaggggttaattgtgtctatatctttcaaaaacttttatattatgtattataagaagttacagtagtaccattttgattagtctgaatgttttcagg

SEQ ID NO: 660 - DNA, 537 bp, Homo sapiens
  misc_feature 14, 97, 123, 137, 144, 157, 177, 238, 243, 287, 313, 335,360, 402, 424, 430, 514, 525: n = A,T,C or G
aaagcttttttttntttttttttttttttttttgtatttggaaaatgttaaattttattatttaacattctttaccattatagttactgcacataanactattactactaaaggtcacttcanagtccctgcaaaanggcctgnaattttggcagcncccattttacacaatatttntttttccacaaaataacagacataccaggaaaatcatttcagctaaaaatatgagtgaggnggtanaaatatcatcccttataaagcgcaatgttagaatagtacttganaaagcaggattgttttaagttccaanatttaacaaacttactgttcancatcatattcaagcctaaaaggaanataggattttcaagatatatttccaacttctttaacatggcnccatggatgaactgtttctcancactgngctgcttcacttggaattaaggatgaattgggaggagacagtatgacataggtgggtaggttgggtggtgaggggaaccagttntaatagtcctnaactccactcca

SEQ ID NO: 661 - DNA, 380 bp, Homo sapiens
  misc_feature 13: n = A,T,C or G
aaaaatctaaggnaagactacaaagcagcataacaggttttctgtcacttgtaaactggattagaaggcaatccccagaattccagaaccgttgtggagatatgatttttaatttacaatctagaaaaactgcattcaacaagtagtccaaggatttgggttctagttgccagcttgcatggtacaatcttgagtaagtctctcaacttctggatataggaaatcaaaggccccccaacagaatgaaaggtgttaaatcaggtcatcttgaatattcttcccagctctgttattttacaacgccatgaaatcagagtaacatgttccaggctgtttggggtttgggattttagaacctgatgcaatgtatagcacttttt

SEQ ID NO: 662 - DNA, 454 bp, Homo sapiens
gaccgcagaaggaggaagatactgtggtactgtcataaaaaacagtggagctctgtattagaaagcccctcagaactgggaaggccaggtaactctagttacacagaaactgtgactaaagtctatgaaactgattacaacagactgtaagaatcaaagtcaactgacatctatgctacatattattatatagtttgtactgagctattgaagtcccattaacttaaagtatatgttttcaaattgccattgctactattgcttgtcggtgttattttattttattgtttttgactttggaagagatgaactgtgtatttaacttaagctattgctcttaaaaccagggagtcagaatatatttgtaagttaaatcattggtgctaataataaatgtggattttgtattaaaatatatagaagcaatttctgtttacatgtccttgctactttt

SEQ ID NO: 663 - DNA, 524 bp, Homo sapiens
  misc_feature 13: n = A,T,C or G
ctcaagacagttngtcatggctctgttgattgcaactccttgtatagcttgtattttgatttagtttatattctgcttattatgtatactgtgttcttatatatgagaaagcacaaatgcgaaagaggtcatgtcttctcaaaatctagcaaaggaagtagtctgcattggtgtgcattacagtattttgcttaatgaaagcctcagttctgaatgttgatatgagtagttaaaaggaagtggggccattttatgtgtttatctgtgtcaagtatttctggtaataagaagcacttaatttacacatattttaatcctgtgaaagattccacatagagaaaagaaagatacctaaccttcaacaaatgttatttttggaaacacaatttttgtcattaaatgttatattatttcacatacataaaacagatgttatgtaagaatgttgtatattttaacataaatcatttagagaaattatctagattcattaattttcatagtgcctttttcacatgagtcag

SEQ ID NO: 664 - DNA, 590 bp, Homo sapiens
aaagaaaaccagcatctctgatgttgcaacatacgtgtaaaatgggtgttacatctatcctgccatttaaccccacagttaataaagtggctgaaaataatagtagctctggcttggtgcttgacctggttaaatactgtcttaaagctcatacaaaacaaataggcttttccataagtggcctttaagaaaacatggaagacaattcatgtttgacaaatgctgacagggtgaagaaagcccagtgtaaaaatgaatcgcgttttaagtgattcggttaaagagtttgggctcccgtagcaaactaatactagataataaggaaatgggggtgaaatatttttttattgttgaatcattttgtgaatgtccccctcaaaaaaagctaatggaatatttggcataaagggcatttggtggttttatttttgtttgagggggattgtcagaaaatcccttttctctcttacgtctaactgactagggaacaattgttgatatgcatagcattggaatacttgtcattatatactcttacaaataacacatgaagcaagaatgaccaatattctgataattggcactggatc

SEQ ID NO: 665 - DNA, 289 bp, Homo sapiens
ccaacatggtgaaaccccatatccattaaaaatatttaaaaatgtagtttcatttatattagttatgtttgataaatgtctcagtatttttataatatgataagcctgggattctacttttagggttatttgtacttttgagtaatatataaagtgacaatattaaggtacatgatcagctctttctatttttactcgtaaaaattatggaaatgaataattttgctaacaactttgaaatttcaaacttctggaaaatatgaaaatattcattgttcattatgaattt

SEQ ID NO: 666 - DNA, 270 bp, Homo sapiens
  misc_feature 15, 241: n = A,T,C or G
aaaatgatttaattnacaaattcttgtgatttacatttcagtaatcaactgcaaaagtgaggaagtaattcatgggcctgtagtgcttttgaaaataatatttatgactcataaaaatgtacattcataatagtatgacatggacatattttaagaaagttcaagcatatacaagcattgtttaatctcacaaaatatattaattttgttgggaatatgtgcattataaaagggtctttantttaccaaagggttcaacactaagctatt

SEQ ID NO: 667 - DNA, 483 bp, Homo sapiens
  misc_feature 16, 22, 26, 70, 76, 83, 85, 101, 111, 113, 120, 123, 142,144, 178, 179, 197, 216, 226, 241, 247, 256, 263, 267, 269,287, 336, 368, 445, 448, 464, 465, 481: n = A,T,C or G
tcttgatctgtctggntgtganaaantcacagatgtggccctagagaagatttccagagctcttggaatnctgacntctcatnanagtggctttttgaaancatctacaancnaaattanttnaactgcgtggaaaaataangncattaccatgcagtccaccaagcagtatgcctgnntgcacgatttaactaacnagggcattggagaagaaanagataatgancacccctggactaancctgtntcttctganaatttcncttntncttatgtgtggatgttanatgctgaagatttggctgatattgaagatactgtggaatggagacatanaaatgttgaaagtctttgtgtaatggaaacancatccaactttagttgttccacctctggttgttttagtaaggacattgttggactaaggactagtgtctgttggcancancattgtgcttctccannctttgcgtattgtggnca

SEQ ID NO: 668 - DNA, 566 bp, Homo sapiens
  misc_feature 13, 14, 514, 526, 530: n = A,T,C or G
aaactagtaatannattttctgaagaatatccaaataaaccaccaactgttaggtttttatccaaaatgtttcatccaaatgtgtatgctgatggtagcatatgtttagatatccttcagaatcgatggagtccaacatatgatgtatcttctatcttaacatcaattcagtctctgctggatgaaccgaatcctaacagtccagccaatagccaggcagcacagctttatcaggaaaacaaacgagaatatgagaaaagagtttcggccattgttgaacaaagctggaatgattcataatagacaactggtctgttaatctttttcatcattgttgtgtataatttacctctcattagaaaggctaacaaattttaagtgccacaggttttaaggattctgcagaaaaaaaagaaaaaagtccttcagtttagaacctacaaaagcttgtgtatcttgattaatgtactttttattgcatggtgtgaactaagttattgctgcataaatttgnaatatatcctgnttgnatttttttccaagtgtataatgttggtgtggagttt

SEQ ID NO: 669 - DNA, 470 bp, Homo sapiens
  misc_feature 14: n = A,T,C or G
aaatcatttatctngatttttatgttttattagcattttcaagaagacggattatctagagaataatcatatatatgcatacgtaaaaatggaccacagtgacttatttgtagttgttagttgccctgctacctagtttgttagtgcatttgagcacacattttaattttcctctaattaaaatgtgcagtattttcagtgtcaaatatatttaactatttagagaatgatttccacctttatgttttaatatcctaggcatctgttgtaataatattttagaaaatgtttggaatttaagaaataacttgtgttactaatttgtataacccatatctgtgcaatggaatataaatatcacaaagttgtttaactagactgcgtgttgtttttcccgtataataaaaccaaagaatagtttggttcttcaaatcttaagagaatccacataaaagaagaaactatttttt

SEQ ID NO: 670 - DNA, 367 bp, Homo sapiens
  misc_feature 14, 67, 248: n = A,T,C or G
ctttccaagttttnccttatgtggaaccgaaatctttctttctcccgtgaaactttactactatcanataattgaagacagatctctttgtattctcttcaagcccaaaccaattctgttccttcaatctaaatagtggtaatatgaatgtttaagaaatgaaataagaaacatgtgcaggcactttggaaggtgctaagtgactgccctaaggaatgaaaagcaagggccaggtgggagtagcccancgaaggcacttgggctgccaggaacaggaggcgtgggaaactctggcttaggaaaacatgaacacaggggcaacagaggcaaactgttgttcgagttaaatataaatctcaggctcttt

SEQ ID NO: 671 - DNA, 349 bp, Homo sapiens
  misc_feature 80, 148, 283: n = A,T,C or G
ccttctttccccactcaattcttcctgccctgttattaattaagatatcttcagcttgtagtcagacacaatcagaatcncagaaaaatcctgcctaaggcaaagaaatataagacaagactatgatatcaatgaatgtgggttaagnaatagatttccagctaaattggtctaaaaaagaatattaagtgtggacagacctatttcaaaggagcttaattgatctcacttgttttagttctgatccagggagatcacccctctaattatttctgaacttggntaataaaagtttataagatttttatgaagcagccactgtatgatattttaagcaaatatgttattt

SEQ ID NO: 672 - DNA, 450 bp, Homo sapiens
taaagcttcagggtcctatttctttgggaatttctttgaatgaagataatttctcactgatgttgccaggttgggatttatgcaatagtggaatgataaaagactattcaggagtaaatttattttccaggaaagttttggacttgtcagataaatacacagccactcttccaaatcaggttggaattccaagaggattggaaaataattgtgattctttgcgagagtcagatactatagtttatttgttgagcagactatttttagttaataaattagttaacatgcctttagaattggcatgtagagttggcaggtaagacatacctagagattttgactatactagattatgacattaaaaatatatatcattatttgctatatttagctctttaacattccttccttctttccagtggggggtaagtatgcaacaatttctggttt

SEQ ID NO: 673 - DNA, 598 bp, Homo sapiens
gccaaccggaacaatgacgccctgcgccaggcaaagcaggagtccactgagtaccggagacaggtgcagtccctcacctgtgaagtggatgcccttaaaggaaccaatgagtccctggaacgccagatgcgtgaaatggaagagaactttgccgttgaagctgctaactaccaagacactattggccgcctgcaggatgagattcagaatatgaaggaggaaatggctcgtcaccttcgtgaataccaagacctgctcaatgttaagatggcccttgacattgagattgccacctacaggaagctgctggaaggcgaggagagcaggatttctctgcctcttccaaacttttcctccctgaacctgagggaaactaatctggattcactccctctggttgatacccactcaaaaaggacacttctgattaagacggttgaaactagagatggacaggttatcaacgaaacttctcagcatcacgatgaccttgaataaaaattgcacacactcagtgcagcaatatattaccagcaagaataaaaaagaaatccatatcttaaagaaacagctttcaagtgccttttctgcagttttt

SEQ ID NO: 674 - DNA, 187 bp, Homo sapiens
  misc_feature 13: n = A,T,C or G
gcatgagttctcnaaaatggtgggaaacctaagaaaggaggagggctgtattcactgatccttagtaacatgttaacatttatgaagcactatatattgatttgcaaaaaaaaaaaaaaaaaaaaaaaaaaaaaaaaaaaaaaaaaaaaaaaaaaaaaaaaaaaaaaaaaaaaaaaaaaaaaaaaaa

SEQ ID NO: 675 - DNA, 291 bp, Homo sapiens
  misc_feature 15: n = A,T,C or G
cttaaagaaacagcnttcaagtgcctttctgcagtttttcaggagcgcaagatagatttggaataggaataagctctagttcttaacaaccgacactcctacaagatttagaaaaaagtttacaacataatctagtttacagaaaaatcttgtgctagaatactttttaaaaggtattttgaataccattaaaactgctttttttttccagcaagtatccaaccaacttggttctgcttcaataaatctttggaaaaacaaaaaaaaaaaaaaaaaaaaaaaagcttgtac

SEQ ID NO: 676 - DNA, 435 bp, Homo sapiens
  misc_feature 13: n = A,T,C or G
aaacaaatgtgcnccacgatgtttcaacaagacaaatgccataaatgtgaaagctgcagtttgcaatataccacatttagaatccagcgaaggtgaatcagacagaggtggtagtcattctaattaaacaatcaggtaacttcacgacaagctgatttgcggcatcaaaagtgtccatttaagtttcttttttcttgatgatcagagggcccacattgtctccagtctcttcgttatgttttgtgtgagccccatcacagaatgggaactttttggacctccaacaacggcagtacacagctttatctcccaaatcctccatgtcaaaagcatgtactatcttggggttgtctttctggatgtgaaggtttatcatagctttatttcgatgatctttaacataaaatcttttgtaagctagataaccaattgcag

SEQ ID NO: 677 - DNA, 244 bp, Homo sapiens
  misc_feature 12: n = A,T,C or G
ctgcaaactganaaacaatccagtaaatgtactttgttttatgtattgtagcaggcaattaactactaaataatagctttgacatttgcaattgttgcatagagactatttttgctagaagatgattagctcttgcctttattttacagtgcttagtgtgataaacttctagtcatgtttcctatccaagagaccagttaatatatgtacataaaccacagaaatagtataacacactattttt

SEQ ID NO: 678 - DNA, 273 bp, Homo sapiens
  misc_feature 14: n = A,T,C or G
aaaatgatttaatngacaaattcttgtgatttacatttcagtaatcaactgcaaaagtgaggaagtaattcatgggcctgtagtgcttttgaaaataatatttatgactcataaaaatgtacattcataatagtatgacatggacatattttaagaaagttcaagcatatacaagcattgtttaatctcacaaaatatattaattttgttgggaatatgtgcattataaaagggtctttagtttaccaaagggttcaacactaagctattttt

SEQ ID NO: 679 - DNA, 361 bp, Homo sapiens
  misc_feature 12, 285: n = A,T,C or G
cccaagatgatnccagcagtggtcttgctcttactccttttggttgaacaagcagcggccctgggagagcctcagctctgctatatcctggatgccatcctgcttctgtatggaattgtcctcaccctcctctactgtcgactgaagatccaagtgcgaaaggcagctataaccagctatgagaaatcagatggtgtttacacgggcctgagcaccaggaaccaggagacttacgagactctgaagcatgagaaaccaccacagtagctttagaatagatgcggncatattcttctttggcttctggttcttccagccctcatggttggcatcacatatgcctgcatgccattaacaccag

SEQ ID NO: 680 - DNA, 273 bp, Homo sapiens
  misc_feature 15, 22, 63, 66, 127, 245, 249, 250, 264: n = A,T,C or G
gatcttgtgctgtgntatccgnaggaaccgcgagatggtctagagtcagcttacatccctgancangaaagtttacccatgaagattggtgggattttttgtttgtttgttttgttttgtttgttgnttgttgtttgtttttttgccactaattttagtattcattctgcattgctagataaaagctgaagttactttatgtttgtcttttaatgcttcattcaatattgacatttgtagttgancggnnggtttggtttgctntggtttata

SEQ ID NO: 681 - DNA, 298 bp, Homo sapiens
  misc_feature 14, 278, 284: n = A,T,C or G
aaagacaaaaaaantcttttatgtacaatatcttgtctagagtctagcaaatatagtacctttcattgcaggatttctgcttaatataacaagcaaaaacaaacaactgaaaaaatataaaccaaagcaaaccaaaccccccgctcaactacaaatgtcaatattgaatgaagcattaaaagacaaacataaagtaacttcagcttttatctagcaatgcagaatgaatactaaaattagtggcaaaaaaacaaacaacaaacaacaaacaaaacaanacaaanaaacaaaaaatccc

SEQ ID NO: 682 - DNA, 273 bp, Homo sapiens
  misc_feature 14, 241, 263, 265: n = A,T,C or G
aaaatgatttaatngacaaattcttgtgatttacatttcagtaatcaactgcaaaagtgaggaagtaattcatgggcctgtagtgcttttgaaaataatatttatgactcataaaaatgtacattcataatagtatgacatggacatattttaagaaagttcaagcatatacaagcattgtttaatctcacaaaatatattaattttgttgggaatatgtgcattataaaagggtctttantttaccaaagggttcaacactnanctattttt

SEQ ID NO: 683 - DNA, 450 bp, Homo sapiens
  misc_feature 13, 14: n = A,T,C or G
ccagaaggaggannatactgtggtactgtcataaaaaacagtggagctctgtattagaaagcccctcagaactgggaaggccaggtaactctagttacacagaaactgtgactaaagtctatgaaactgattacaacagactgtaagaatcaaagtcaactgacatctatgctacatattattatatagtttgtactgagctattgaagtcccattaacttaaagtatgtgttttcaaattgccattgctactattgcttgtcggtgttattttattttattgtttttgactttggaagagatgaactgtgtatttaacttaagctattgctcttaaaaccagggagtcagaatatatttgtaagttaaatcattggtgctaataataaatgtggattttgtattaaaatatatagaagcaatttctgtttacatgtccttgctactttt

SEQ ID NO: 684 - DNA, 463 bp, Homo sapiens
  misc_feature 69: n = A,T,C or G
ctgggctggaacgtgaactcagtagctgaacctgtctgacccggtcacgttcttggatcctcagaactntttgctcttgtcggggtgggggtgggaactcacgtggggagcggtggctgagaaaatgtaaggattctggaatacatattccatgggactttccttccctctcctgcttcctcttttcctgctccctaacctttcgccgaatggggcagcaccactgacgtttctgggcggccagtgcggctgccaggttcctgtactactgccttgtacttttcattttggctcaccgtggattttctcataggaagtttggtcagagtgaattgaatattgtaagtcagccactgggacccgaggatttctgggaccccgcagttgggaggaggaagtagtccagccttccaggtggcgtgagaggcaatgactcgttacctgccgcccatcaccttggagg

SEQ ID NO: 685 - DNA, 209 bp, Homo sapiens
  misc_feature 13: n = A,T,C or G
ggaaatcaatatnggaagtattgctaaaatcttataatatgaaaagagatccactaatgtagcttaaggttattagatttgggcttttaatcatggaataatcttatgtattggtgtaagagttgatgaatgactttagctgtgtgaatatataatagtcaaactgcaaacattttgcatcccttttgtgacctaatttacagacattt

SEQ ID NO: 686 - DNA, 536 bp, Homo sapiens
tctgccccaagaaggacgtactcgaaaccttcaccgtgaagtcctgtcctgatgccatcaaagaggtcttcgacaataaattccacatcatcggcgcagtgggcatcggcattgccgtggtcatgatatttggcatgatcttcagtatgatcttgtgctgtgctatccgcaggaaccgcgagatggtctagagtcagcttacatccctgagcaggaaagtttacccatgaagattggtgggattttttgtttgtttgttttgttttgtttgttgtttgttgtttgtttttttgccactaattttagtattcattctgcattgctagataaaagctgaagttactttatgtttgtcttttaatgcttcattcaatattgacatttgtagttgagcggggggtttggtttgctttggtttatattttttcagttgtttgtttttgcttgttatattaagcagaaatcctgcaatgaaaggtactatatttgctagactctagacgagatattgtacataaaagaatttttttgtcttt

SEQ ID NO: 687 - DNA, 346 bp, Homo sapiens
  misc_feature 14: n = A,T,C or G
cctggtagtgacantagaaactactccatcactattcggcaggagatagacattccaagaatcaagcactacaaagtgatgagcgtaggacaaaactacactattgaactggaaaaacctgtaacactcccaaaccttttcagtgtcattgattattttgtgaaggagactcgaggaaatttaagaccatttatatgttcaactgatgaaaacactggtcaagaacccagtatggaagggagaagtgaaaagttgaagaaaaatccacacattgcatgaaatacaatgtgaaagctcctttgtatatcttggtaatttatattttcaaaacgaagttcttactttt

SEQ ID NO: 688 - DNA, 367 bp, Homo sapiens
  misc_feature 14: n = A,T,C or G
aaaaagaaaaaaanaagaaactttacattttggagacaaacctgtgtgagttttttattggtacaaacgttgtatttaacactaggggttttgtacagttttttgccttttctactagaaaacaatgtaaagtgatttcacaatgtgaagagaaaaaaaattgccactatgaccaaacgcacagtctgttctgcagcaacaacgggattcaatcaactcagtcgtgattcagccgtagaaatgcttttcctttatcttgtttgagcttttcctttctttcctgttttgatttgcaaaagaaaatgtcttttttgtgtgaacttgtgttgtactctgtagaaaattatggattttactttaatggttt

SEQ ID NO: 689 - DNA, 244 bp, Homo sapiens
  misc_feature 13, 14, 15: n = A,T,C or G
ttttttttttttnnnttttttgaatatggaaagtataggattttttatttattcttaatggccgcatgatattccactgtgcggctgaaccaaaaatcatttaaccagttccaagttgttgggcatacagcttgttttcaatcagtcgctttatacataccagtgaaataaacatcactgctgttgctgctaaaggattctctggtcaccgaccaggggtagacgtaactggggtgggcccgca

SEQ ID NO: 690 - DNA, 557 bp, Homo sapiens
  misc_feature 14: n = A,T,C or G
aaaaagttaaagtnctagcacatatatgtgttaggaaaatggtctctgtcaattgcccattttcccaattaaattaacctacgatttcctttttttaacagcttatttttttcataaaagttgtactttgagaagttactttctaattacgtcatgagaacacaacttgtaattagcaacacttctgtcagtctagatcacttcttctgcagagagcttttcaaccaagttggcatcaaccagcacaataaagttttcactgttttacctgtttcctgtatatggtgtaatcagtgaaagaaatggcatttcacatcctaaataatacggtgaaacactgtctaaaaattacttagatttaacagaattgcaattaggttttgacaatgtatttacttcaagacaatgtattttatcaggaaaaaatatcttgaaagaaagatctctgaaattatttttcatttgatacgccttttctgtgacaaaattttggggtgaaatgatgatgtttgctgattgatttagtactaaaaagactagtactaagaagactaaag

SEQ ID NO: 691 - DNA, 412 bp, Homo sapiens
  misc_feature 13: n = A,T,C or G
agcttatcttgcnacagatatttaattttgctaacactcagctctgccctccccgatcccctggctccccagcacacattcctttgaaataaggtttcaatatacatctacatactatatatatatttggcaacttgtatttgtgtgtatatatatatatatatgtttatgtatatatgtgattctgataaaatagacattgctattctgttttttatatgtaaaaacaaaacaagaaaaaatagagaattctacatactaaatctctctccttttttaattttaatatttgttatcatttatttattggtgctactgtttatccgtaataattgtggggaaaagatattaacatcacgtctttgtctctagtgcagtttttcgagatattccgtagtacatatttattttt

SEQ ID NO: 692 - DNA, 150 bp, Homo sapiens
  misc_feature 14: n = A,T,C or G
ggcccttatgtttnttctggcctggttactctccaggccactgagcagagccttcgtgcccctaaccaagtgctctctgtcccctcagggcaagctggaaatgaccttggagattgtagcagagagtgagcatgaggagcggcctgctgg

SEQ ID NO: 693 - DNA, 419 bp, Homo sapiens
  misc_feature 13, 144, 152: n = A,T,C or G
atgaaaggaaatncaagacagtttgcaagagaagtggtgtacaggaaattacttcatttgacaggagtatgtacagaaaattcaagttttgtttgagacttcataagcttggtgcatttttaagatgttttagctgttcaaatntgtttgtntcttgaaacagtgacacaaaggtgtaattctctatggtttgaaatggatcatacgaggcatgtaataccaagaattgttactttacaatgttcccttaagcaaaattgaatttgctttgaacttttagttatgcacagactgataataaacctctaaacctgcccagcggaagtgtgtttttttttaaatttaaattccattccaacaaagcaaccaaaacaactaatgtctagtttttagcttctggggaattaggttcccaggta

SEQ ID NO: 694 - DNA, 555 bp, Homo sapiens
  misc_feature 14: n = A,T,C or G
ccttaaaggaaccnatgagtccctggaacgccagatgcgtgaaatggaagagaactttgccgttgaagctgctaactaccaagacactattggccgcctgcaggatgagattcagaatatgaaggaggaaatggctcgtcaccttcgtgaataccaagacctgctcaatgttaagatggcccttgacattgagattgccacctacaggaagctgctggaaggcgaggagagcaggatttctctgcctcttccaaacttttcctccctgaacctgagggaaactaatctggattcactccctctggttgatacccactcaaaaaggacacttctgattaagacggttgaaactagagatggacaggttatcaacgaaacttctcagcatcacgatgaccttgaataaaaattgcacacactcagtgcagcaatatattaccagcaagaataaaaaagaaatccatatcttaaagaaacagctttcaagtgcctttctgcagtttttcaggagcgcaagatagatttggaataggaataagctctagttcttaacaa

SEQ ID NO: 695 - DNA, 349 bp, Homo sapiens
  misc_feature 13, 257: n = A,T,C or G
tatatacagacanatatatgggacctactgcttctctgaggaaatgcataatctgttaatatcagacaaaatgagcaattggcagtgctcataatatattccaatttttattggaattttcgatggaatgttatttcaataaagccatgtaaggtgaaactttgataactttttactcttcaagttagggtaaattctgatccaatattcaattcatttgtgtactcccacatgcaaaatgctaaattacaatgcanacattaagaaaaagtattgactggaggggttgaattccttgagaatttattttatagtctaaatcacaaatactttactcaatttagttttt

SEQ ID NO: 696 - DNA, 520 bp, Homo sapiens
aaatccagaaatctttgtactgatgtaaatgattgtagttattttggatagtgttttgctaacaaaaggagagacttttttcatgcatatttctattttgtttttttgggttttattttattttaatagtagtaaaatacttggaataatttttcatattcttgtcattaatattattttgtatttttatgaggaaatatataattttatgacactaattgctaaagtttattttatgttgaattatttttggagctgaaatctttgtaatattaaagcaactagtttctaattcccagtttctgtatagaatcgcacaagtggtttatggagtgtttggattgtaattataaatggttctttgatatgcaaattaatattttcagttgattttattttatattcctaatggggtgttaaagccgttttttatttttttctaaataaaaagagaacccatgcttttatggacactaggtaaacaccttcagcttaaatttttcgttaaatattttagttt

SEQ ID NO: 697 - DNA, 296 bp, Homo sapiens
gagagtcaccaggtccccacagggtgtcagagagggtgtggagctgcttagcactcagcatcactgtctggttaaacacagtccagatgacaccctgggcacagggcggtgtagtcagagacccctcatattggaagtagcggctgaagtcagagggcaggagtgcagatatgtccagtcctgggacctgagtctctgagccttcctcagcgatttcttccaagcgagacagcaactgctcataggcactgttttcttccgggccctcctccagaaaggcggccaacacggccagg

SEQ ID NO: 698 - DNA, 364 bp, Homo sapiens
  misc_feature 12: n = A,T,C or G
gaatggctgganagccaccaagatgctgacattgaagacttcaaagctaagaagaaggaactggaagaaattgttcaaccaattatcagcaaactctatggaagtgcaggccctcccccaactggtgaagaggatacagcagaaaaagatgagttgtagacactgatctgctagtgctgtaatattgtaaatactggactcaggaacttttgttaggaaaaaattgaaagaacttaagtctcgaatgtaattggaatcttcacctcagagtggagttgaaactgctatagcctaagcggctgtttactgcttttcattagcagttgctcacatgtctttgggtgggggggagaagaagaattgg

SEQ ID NO: 699 - DNA, 343 bp, Homo sapiens
tgggggctgtctttgcagggcacagatgaccaaagtcccttcctgcttcctgttacctgtcttgctcctggggagaaagaggggcctgatgagactccactcaggtgcacacatcaccaggtgcatctgcaggcaccgggctggctgcttgcagccaggagaaggtcagcgagaaggagtgtatgagtgtgagtgtgtgtgcatggaagttggggcactgggcgtctgactccctccccacccaagagaggaaggacccctcaccacccccactggcgagacagtttactttgccgacttgccatgtttttgccaaaaccaagattttgaaggaaatgagtgg

SEQ ID NO: 700 - DNA, 583 bp, Homo sapiens
  misc_feature 12: n = A,T,C or G
aaagtgcaattnattgaaaggtttaagcaaatcaggataaaggatctttctaataaatgactaacattaaagagatgctatattgatatatttagataaatctttcaaaaatcataattgatttctatagatgccaaatttacttctgttgtaacaatgacctgcccccctcaaaccccaaacttaattgctgaggattaagaagatcctctaattggcaagagctttttctgatgttaatatttttgtctgtttcaatacatctaactaaaaagaactatgggtctagagtagttgctttagcagccctgagttctataaccacaatggcattcctgttagaacttaagagaatgttgtgaacgttccccattctatttgaggagaaaacaaagaactcagttgctttctgatttagcaaagtaactatgctttgggctatagtgttaatgtctaagataaaggtagcaaaaattggagttatctaagaatcagaaaatgctttagagaaatgaactgtaaggaatgtttctaggagctgtctgatggggtagaagggattgcaacacaaaggccatttact

SEQ ID NO: 701 - DNA, 220 bp, Homo sapiens
aatcctatttattacctcagaaatttttttcttcgcaggatttttctgagccttttaccactccagcctagcccctaccccccaattaggagggcactggcccccaacaggcatcaccccgctaaatcccctagaagtcccactcctaaacacatccgtattactcgcatcaggagtatcaatcacctgagctcaccatagtctaatagaaaacaaccga

SEQ ID NO: 702 - DNA, 556 bp, Homo sapiens
  misc_feature 14: n = A,T,C or G
aaaaagctatgctncaagaggacatttcatgccgtcaaaatgagactgtgaatcagaaagttctcggggaactgcaaggtgctctcaactaggggtcggttccttctcagtcatggcactgactcatctccacagggttctcacctgcgggaggaaaatggaggagttgcgcctgtcagaaactgtctgtgtgattcggggaagaatatggagtatcttagtagcattccattattacttgcccctaaatacatgatgccagccccctgcacagataacctcctgcttttatagcttgaaatatatttgatctaaaccacgatttgacatcttcagagagagagaagtagataaaagtctccattccaggttggcagtagggatcctgcagaagtggctgaaatgaaatttggcctacagagaataagttctacagtcattttgtttctgcctatttcctccagattcaaaggcagtacaagctttttttttttttttttttttttgcatcaaaaagctttatttccatttggtccaaggcttgttaggatagtta

SEQ ID NO: 703 - DNA, 580 bp, Homo sapiens
  misc_feature 578: n = A,T,C or G
aaattctgtgcttcagacaggactattgcttgttgatttttctagaaatctgcacggtataatgaaaatattaagacagtttcccatgtaatgtattccttcttagattgcatcgaaatgcactatcatatatgcttgtaaatattcaaatgaatttgcactaataaagtcctttgttggtatgtgaattctctttgttgctgttgcaaacagtgcatcttacacaacttcactcaattcaaaagaaaactccattaaaagtactaatgaaaaaacatgacatactgtcaaagtcctcatatctaggaaagacacagaaactctctttgtcacagaaactctctgtgtctttcctagacataatagagttgtttttcaactctatctttgaatgtggataccctgaattttgtataattagtgtaaatacagtgttcagtccttcaagtgatatttttatttttttattcataccactagctacttgttttctaatctgcttcattctaatgcttatattcatcttttccctaaatttgtgatgctgcagatcctacatcattcagatagaaaccttntt

SEQ ID NO: 704 - DNA, 435 bp, Homo sapiens
aaaatcttgagggattgatctcgcctcatgacagcaagttcaatgtttttgccacctgactgaaccacttccaggagtgccttgatcaccagcttaatggtcagatcatctgtttcaatggcttcgtcagtatagttcttctccaggaactcacgcactgacttggcaccccggcctatggcattggccttccaggcatggtatgtgcccgaggggtcagtctgatagagcctaggagtgccatcaaagtcgaaacccacgatgagggcagagatgccaaacggcctgcgcccattgctctgcgtataacgctgcttcagactggcgatgtagcgggtgatgtactccacagtgaccgggtcctccacagtcagccggtggctctggcactccacccgggccctgttgatgactatccttgcatcggcggtgagg

SEQ ID NO: 705 - DNA, 217 bp, Homo sapiens
  misc_feature 14: n = A,T,C or G
ccacagcatgcacnagtgataggggcaggtttaatgagttttatgctcagatcgctgggtctcctggctgctcttgtccatctctgcaccttggtcctgagcattctgagactcagtcagtacaagcttttttttttttttcttttttttttttttttttttttttttttttttttttttttttttttttttttttttttttttttttttttttttt

SEQ ID NO: 706 - DNA, 481 bp, Homo sapiens
  misc_feature 469: n = A,T,C or G
ttgcagagttctgatggagagatatttgaagttgatgtggaaattgccaaacaatctgtgactattaagaccatgttggaagatttgggaatggatgatgaaggagatgatgacccagttcctctaccaaatgtgaatgcagcaatattaaaaaaggtcattcagtggtgcacccaccacaaggatgaccctcctcctcctgaagatgatgagaacaaagaaaagcgaacagatgatatccctgtttgggaccaagaattcctgaaagttgaccaaggaacactttttgaactcattctggctgcaaactacttagacatcaaaggtttgcttgatgttacatgcaagactgttgccaatatgatcaaggggaaaactcctgaggagattcgcaagaccttcaatatcaaaaatgactttactgaagaggaggaagcccaggtacgcaaagagaaccagtggtgtgaanagaagtgaaatg

SEQ ID NO: 707 - DNA, 584 bp, Homo sapiens
ctgatcacaccaagagagaagatgatgaggcccaggcccagagtcactgcagacacagaaaccttcagggtctgcatgggggacagcccaggtgtccagtcccgaaggatgggctcaggagccccaatgtgctctaccacacaggtgtaagtgtccccgtaagagggggttaaggctaaatgggagagggtctggtatgtccagtctccattgggctgggcagtcttgtgcgcactgctgtgaggcatgacaagcttcccgttcttcctccacgtgatagtcacttctgctggatagaagccccacacatagcaggccagcatcacaggctccctcgtgttaaaaggagtggttttggctacttgcacagatggtggccgtgtcctgttggtcagtgatccccagaagggctgggtgtgtgtggcacaattctgaagcccattgcgcaagcgctgcatcagggtgtctttttggttgaggtgctgtgagaggacattcgccaagctattcagcaccccaaattcgcaaggggccatcttattctcctctggatcccagcaggtcagcagatccttgttgaagga

SEQ ID NO: 708 - DNA, 318 bp, Homo sapiens
  misc_feature 65, 129: n = A,T,C or G
tcaaaaaggacacttctgattaagacggttgaaactagagatggacaggttatcaacgaaacttntcagcatcacgatgaccttgaataaaaattgcacacactcagtgcagcaatatattaccagcangaataaaaaagaaatccatatcttaaagaaacagctttcaagtgcctttctgcagtttttcaggagcgcaagatagatttggaataggaataagctctagttcttaacaaccgacactcctacaagatttagaaaaaagtttacaacatgatctagtttacagaaaaatcttgtgctagaatacttttt

SEQ ID NO: 709 - DNA, 292 bp, Homo sapiens
  misc_feature 13, 71, 110, 117: n = A,T,C or G
ctgtgggcaacanctgcatcagccccaaggcttccctccagaccaaaaggtgattcaaacacttagttcanaaaccttaaaggatttgaatatttcaaattgcacacgtnactccancatctctgtaaaataattggaatgaaaatacttcttgcacttaaacactgcacatgccgtactttgaggttagtctgaatcttgaactttaataccaaattaattttgaatgcttttgtttcctaagagataatggcatggtttcatatgttatactttggacagacagagtttt

SEQ ID NO: 710 - DNA, 205 bp, Homo sapiens
  misc_feature 13: n = A,T,C or G
cctctgcaaagancggagagaagcttcccaaagggagaaaggggaaagcagatgctggaaaggatgggaacaaccctgcaaaaaaccgagatgcctctacactccagtcccagaaagcggaaggcactggggatgccaagtgaaatgtacatttttgagagctctgtacttatagtgactctactgtttgaaatactattttttt

SEQ ID NO: 711 - DNA, 588 bp, Homo sapiens
aaatcaactaaagactcatgagatttatttggttacagtgaataacctggacaaaatgttgagaagagttgttaaaacaagtttacattaaatatactaacaattacgtttggttacatatttgtaagtgatggttatttagaaaaactgcatagaaatccaaaccttaaatattctgcaaatcaaatcattagcttttctcttctctaataaagtagggtgactagttcttggattaatctaactataacattaatgtagcacttgattatcttatggaataattctctatctcatctaagcctcacaacaaccttgtaaagtattatccccattttatggaggaagaaacaggcttagaagtggaaaggtagattctctgcccgcacaaccgtattatgtggctaagctattgaacttgaacctagatttgggacttcatttcaaatatgaaattttttgattaaatctttttatcttgtatggaaaaaatatctcattagctgtcagatgttatttaccctgctaactgttaaaaatatttcattaaaaaaattcagcttcatagcctttcagtttccctttaag

SEQ ID NO: 712 - DNA, 287 bp, Homo sapiens
ggggggctcacctgaaggctcgaaggcactgcacacttgtatattgtcagtgaagaactgttagttggttgtcagtgaacaataactttattatatgagtttttgtagcatcttaagaattatacatatgtttgaaatattgaaactaagctacggtaccagtaattagatgtagaatcttgtttgtaggctgaattttaatctgtatttattgtcttttgtatctcagaaattagaaacttgctacagacttacccgtaatatttgtcaagatcatagctgacttt

SEQ ID NO: 713 - DNA, 245 bp, Homo sapiens
cctctttttaccacctccgaggtgattttcatattgaattgcaaattcgaagaagcagcttcaaacctgccggggcttctcccgccttttttcccggcggcgggagaagtagattgaagccagttgattagggtgcttagctgttaactaagtgtttgtgggtttaagtcccattggtctagtaagggcttagcttaattaaagtggctgatttgcgttcagttgatgcagagtggggttttgca

SEQ ID NO: 714 - DNA, 377 bp, Homo sapiens
  misc_feature 14: n = A,T,C or G
aaaaaataatcacngcacaaaatgtaaagggtggggttatgctgtgatattaattttcctcaataatgtttttcttgactgttcaagaacaaattaaagtttccacggcaaatttgttttcaaaatgccgaattgcgaaacaattgctggcttcacgtttctgaatacctttaatagtttctctgcgttgcagtttgtaagtttccttgtcatgacgcagtcgataaataaagaaacccaggtgatcaatgttttcaatgcgatcagtaataaccatgtgctcatgaatcagataggactgaggcaaataggttccagccttgatgttaataagtaactccagtaggtttctgggtggcataacaatggaagtgttc

SEQ ID NO: 715 - DNA, 523 bp, Homo sapiens
gttcctgtgctcacagtcatcaattatagaccccacaacatgcgccctgaagacagaatgttccatatcagagctgtgatcttgagagccctctccttggctttcctgctgagtctccgaggagctggggccatcaaggcggaccatgtgtcaacttatgccgcgtttgtacagacgcatagaccaacaggggagtttatgtttgaatttgatgaagatgagatgttctatgtggatctggacaagaaggagaccgtctggcatctggaggagtttggccgagccttttcctttgaggctcagggcgggctggctaacattgctatattgaacaacaacttgaataccttgatccagcgttccaaccacactcaggccgccaatgatccccctgaggtgaccgtgtttcccaaggagcctgtggagctgggctagcccaacaccctcatctgccacattgacaggttcttcccaccagtgctcaacgtcacatggctgtgcaatggggagccagtcacttgag

SEQ ID NO: 716 - DNA, 333 bp, Homo sapiens
  misc_feature 14: n = A,T,C or G
aaaaaaaacaacancgtaaatattagcccgcaagagcagtcctaaacaatcacaattacactgtactacccaagaagactgtttattgtgaagcatttacctttcaaaaaatcattacatttctatttcttggtggagcagcacattgtggagtgtgattcttaattcttcattgagtttgtcaataggacattgatgctggataggttgtcttttgtttttatgtctcagaccatcttgcgagattgtttgcctatctcataatacagttttatgcagaaaggttgaaactatgtaaatggtttttatggaaattatcagttacaatatttt

SEQ ID NO: 717 - DNA, 476 bp, Homo sapiens
aaaaaatcatgagaaaatgagtagtgtattttacccatagatttttctgctctattgttcttcctttgcactgatgttccaagttccttttgttgtaattttctctctctgaagaacttcctttaacagttcttttaatcaggtcactaagtcgtttcttccatcttgaggtccctagaaactctgtcttctccgtctctaccttttggaatcttctgctgcttggttcatttgatttatccaaggttttaggtatgataagagggtggactaaggcaaaatatgcttgccccatccttctggaactggaagtcctccctatacttttaaattctccagttttttgttatatagggatcaaccagctaagaaaagattttaatcaagttgaattgaggggattaatatgaaaacttatgacctcttcctttaggagggagttatctaaaagaaatgtctattaaggtgatatattt

SEQ ID NO: 718 - DNA, 597 bp, Homo sapiens
  misc_feature 15, 543: n = A,T,C or G
gggagcctcagcggnctgcgcctggcagcaggaagctgttttaggttatgtgaaagagatgtttcctcatctctaaggcttaccagaagctctgatttgaagagaataaatggattttgcacaaaaccacaggaaagtcccggagctccatcccgcacttacaacagagtgcctttacacaaacctacggattggcagaaaaagatcctcatatggtcaggtcgcttcaaaaaggaagatgaaatcccagagactgtctcgttggagatgcttgatgctgcaaagaacaagatgcgagtgaagatcagctatctaatgattgccctgacggtggtagaatgcatcttcatggttattgagggcaagaaggctgcccaaagacacgagactttaacaagcttgaacttagaaaagaaagctcgtctgaaagaggaagcagctatgaaggccaaaacagagtagcagaggtatccgtgttggctggattttgaaaatccaggaattatgttataacgtgcctgtattaaaaaggatgtggtattnaggatccatttcataaagtatgatttgcccaaacctgtaccatttccgtatttc

SEQ ID NO: 719 - DNA, 429 bp, Homo sapiens
cctttgactggtccccagtggtgacctatgtgtgtgatcttgaagggaacagagtcaagggtccagagaaggaggagaagttgagacaggcggtcaagcaggtgctgaagtgtgatgtgactcagagccagccactgggggccgtccccttacccccggctgactgcgtgctcagcacactgtgtctggatgccgcctgcccagacctccccacctactgcagggcgctcaggaacctcggcagcctactgaagccagggggcttcctggtgatcatggatgcgctcaagagcagctactacatgattggtgagcagaagttctccagcctccccctgggccgggaggcagtagaggctgctgtgaaagaggctggctacacaatcgaatggtttgaggtgatctcgcaaagttattcttccaccatgg

SEQ ID NO: 720 - DNA, 588 bp, Homo sapiens
  misc_feature 582: n = A,T,C or G
ccacctggagacggtgattttgggcctattgaagacacctgctcagtatgacgcttctgagctaaaagcttccatgaaggggctgggaaccgacgaggactctctcattgagatcatctgctccagaaccaaccaggagctgcaggaaattaacagagtctacaaggaaatgtacaagactgatctggagaaggacattatttcggacacatctggtgacttccgcaagctgatggttgccctggcaaagggtagaagagcagaggatggctctgtcattgattatgaactgattgaccaagatgctcgggatctctatgacgctggagtgaagaggaaaggaactgatgttcccaagtggatcagcatcatgaccgagcggagcgtgccccacctccagaaagtatttgataggtacaagagttacagcccttatgacatgttggaaagcatcaggaaagaggttaaaggagacctggaaaatgctttcctgaacctggttcagtgcattcagaacaagcccccgtattttgctgatcggctgtatgactccatgaagggcaaggggacgcgagataaggncctgat

SEQ ID NO: 721 - DNA, 376 bp, Homo sapiens
  misc_feature 13, 14, 89, 155, 160, 205, 215: n = A,T,C or G
aaaagcagagctnntctattctagttactgatgcaactaaaattctgtatttcttaagatggagccactgacgagatgtcacagtatanagcctgcagtctcaactcattgtgatcctaatggtctgggtgattggatggtttgagttgttaggnatttngagtttttcattttattgcatatctgggttggatgttagactaanggaaacccangaatatttacctggtgttacatttaatatttaatgtaactggtctagcaacattaagggggatttctgaagccaactccggaggctgtgggctgcacattttgcactgtttttatatacttgtattcatatcctcttatcacctcagactcagacacaagg

SEQ ID NO: 722 - DNA, 369 bp, Homo sapiens
  misc_feature 160, 164: n = A,T,C or G
ctgcacggccaggcggctgttgcggtcccccatgatgctatgcaccttctccagacccagccagaactcgccgtggggatccccaaaccccgccttgtaggcttcccagggccggttgaagtccactgagccatcgtggcgcctctgaattactgtccancctncatctgaggtcatcttgcagttcaccaaaaatggcggagacccctgaggctggatttcaaatagtccactctgcctctccccaacctggaacagctcctggcaatccctgggcagccggtgcaggcggctgacattgtgagccgggtcaactggctgggccatctcgggcagcctctttcttcgggcaggcttggacctcggccg

SEQ ID NO: 723 - DNA, 527 bp, Homo sapiens
aaaaacttttatttcctattccttttgtcggtaaagcagtctgaatttggaacattttatcatggagtcaacagtgaagactaccagataattttgtattggagaagaggaaataacagctaaattgtggatttcagtgctttacatggtgcctttcgagtcagcttttacattataggggcttgttatagtttagctaagatgaccacttaacagtttatacagaactcatatgtataaatcaacattcttaggatattatttatatcctttgaataaatccctgtgaagtttttcctccccactaaaatggtgcataataaaacatgaaatatgtagtatgcagatatcatttattagatagtttgtagtgtatacatttagaacatacttcttttgacaaagggtgatctgattgctaatttaccattttattctgtcaggtacaggtgaaacaaattctcatcttgaatgatcagatgcaaaatcatttctgaaccctagagcagaagttagaaataacaaaa

SEQ ID NO: 724 - DNA, 277 bp, Homo sapiens
cggccgaggtccagcttagccctgttgcagaggcaatttgatgtggacattcttatctcgggacacacacacaaatttgaagcatttgagcatgaaaataaattctacattaatccaggttctgccactggggcatataatgccttggaaacaaacattattccatcatttgtgttgatggatatccaggcttctacagtggtcacctatgtgtatcagctaattggagatgatgtgaaagtagaacgaatcgaatacaaaaaaccttaaagccagg

SEQ ID NO: 725 - DNA, 592 bp, Homo sapiens
aaacagttctctaatttttgaaaaatcgtgccaagcaataagatttatgtatatttgtttaataataacctatttcaagtctgagttttgaaaatttacatttcccaagtattgcattattgaggtatttaagaagattattttagagaaaaatatttctcatttgatataatttttctctgtttcactgtgtgaaaaaaagaagatatttcccataaatgggaagtttgcccattgtctcaagaaatgtgtatttcagtgacaatttcgtggtctttttagaggtatattccaaaatttctttgtatttttaggttatgcaactaataaaaactaccttacattaattaattacagttttctacacatggtaatacaggatatgctactgatttaggaagtttttaagttcatggtattctcttgattccaacaaagtttgattttctcttgtatttttcttacttactatgggttacattttttatttttcaaattggatgataatttcttggaaacattttttatgttttagtaaacagtatttttttgttgtttcaaactgaagtttactgagagatccatcaaattg

SEQ ID NO: 726 - DNA, 522 bp, Homo sapiens
  misc_feature 343, 359, 403, 405, 437, 463: n = A,T,C or G
atttattgcaaccaaaagttaaccgtgatggggttaacttttggttgcaataaatgctgaaagcatacccctggcttctacttcttcaacatacctcacaacctaataaatgtatttcaggataaagagagaacatagaacacccaggaggaaacttttgaagaagggagctcagaatcatggacataattttcctatgtgataagcaggtattacgtagtccctgtagcttcccaatacatgaatcaaggttaattatcataaaccaaaatgtaaccaagtagatatgttgatacattggcatgtgtgttcgtattgctactatacacagtgaaaatttatnctaatatgtatcattncattatatccaggaccaaagtggaaaaaaaaccccactcaagtngnatatcatcataaaggagtttttgtttgtttgntttttcaataacataagagtcaaganagttgggaggtatgtcctaaggatgtgattgactcttgacatttaacaactttgaacaa

SEQ ID NO: 727 - DNA, 272 bp, Homo sapiens
  misc_feature 13: n = A,T,C or G
ctgagggcacgcnctgcactccgtaactcaacatggcatgcctttctctccgtaaactatttagtgagatttttagggactatttttcagtatctctgtacctgttaaagggggtgcttttcgatctaaaaacttaattttataaaattgacttatttttctagactaaaattgtatatgcttttggtaattaggaactcttgagaatattggctgctgattgttgccatcacgttcctacaaaattgtttttctatgggatgttctggcag

SEQ ID NO: 728 - DNA, 286 bp, Homo sapiens
  misc_feature 12, 13, 212, 214: n = A,T,C or G
tttttttttttnngaaggttctcatgtgttccatttattttgtctctcaaattttaggaatcttctcctttaattaactcatcaacctctcatggcaagaatttgagaaagtaaatttatactcaggttctaattttaatagggaaggaagaagttacagctcagtgcaccatgaagttgagacagagatggagacacctcagccccacctntntggaacaggaaagatgattggggagggagcacaggtcagcgtgggaagagggtcatggtggacatgggggtg

SEQ ID NO: 729 - DNA, 436 bp, Homo sapiens
  misc_feature 14: n = A,T,C or G
ctgcacctcacatntccacttagcatcactctagtggaggctctctgtgggctgggcatgctagctcagttctcttttcttcttcttataaagccaccagtcccattcctgtgataacccattaatccattaacccatgaatgaaggcacagccttacgatccaatcacatctcaaaggccccacctttcagtattgccacattagggattaagtctcaacatgagtgttggagggaacattcaaaccacagcagtatgaaaacaatattcaactccaaggtatatggtcaagattacaggtggtaaggaataggctagagaataggaataggctaaatttgctagagatgtgctgtggaattatctgtatttctagctatgatcttagcttcctcaagtccatttcattgcaagaatatgaaaaattaaattgag

SEQ ID NO: 730 - DNA, 563 bp, Homo sapiens
  misc_feature 14, 543: n = A,T,C or G
cctgctgggcttgncaacgagggactcggcctcggaggcgacccagaccacacagacactgggtcaaggagtaagcagaggataaacaactggaaggagagcaagcacaaagtcatcatggcttcagcgtctgctcgtggaaaccaagataaagatgcccattttccaccaccaagcaagcagagcctgttgttttgtccaaaatcaaaactgcacatccacagagcagagatctcaaagattatgcgagaatgtcaggaagaaagtttctggaagagagctctgcctttttctcttgtaagcatgcttgtcacccagggactagtctaccaaggttatttggcagctaattctagatttggatcattgcccaaagttgcacttgctggtctcttgggatttggccttggaaaggtatcatacataggagtatgccagagtaaattccatttttttgaagatcagctccgtggggctggttttggtccacagcataacaggcactgcctccttacctgtgaggaatgcaaaataaagcatggnataagtgagaagggagactc

SEQ ID NO: 731 - DNA, 170 bp, Homo sapiens
aaattttaatactcaagaaaacaaacctaagttaaaattggatacaaatactgctggcataagaaaatatacacaaatttggattcaaatggggttattatgtgaacctggatgtaagactacatcctaacaacctgttgttgaagccttttaataaagtaacagatttt

SEQ ID NO: 732 - DNA, 464 bp, Homo sapiens
  misc_feature 13, 14, 15: n = A,T,C or G
cctccaaggtgannnggcggcaggtaacgagtcattgcctctcacgccacctggaaggctggactacttcctcctcccaactgcggggtcccagaaatcctcgggtcccagtggctgacttacaatattcaattcactctgaccaaacttcctatgagaaaatccacggtgagccaaaatgaaaagtacaaggcagtagtacaggaacctggcagccgcactggccgcccagaaacgtcagtggtgctgccccattcggcgaaaggttagggagcaggaaaagaggaagcaggagagggaaggaaagtcccatggaatatgtattccagaatccttacattttctcagccaccgctccccacgtgagttcccacccccaccccgacaagagcaaagagttctgaggatccaagaacgtgaccgggtcagacaggttcagctactgagttcacgttccagcccag

SEQ ID NO: 733 - DNA, 281 bp, Homo sapiens
  misc_feature 17: n = A,T,C or G
ccaacttcttggcccanacagaggccctgatgaggggaaaatcgacggaggaggcccgaaaggagctccaggctgcgggcaagagtccagaggaccttgagaggctgctgccacataaggtctttgaaggaaatcgcccaaccaactctattgtgttcaccaagctcacaccattcatgcttggagccttggtcgccatgtatgagcacaagatcttcgttcagggcatcatctgggacatcaacagctttgaccagtggggagtggagctgggaaagcag

SEQ ID NO: 734 - DNA, 286 bp, Homo sapiens
  misc_feature 13, 21, 24, 38, 199, 202, 210, 212, 213: n = A,T,C or G
gtggggccatttnatgtgttnatntgtgtcaagtattnctggtaataagaagcacttaatttacacatattttaatcctgtgaaagattccacatagagaaaagaaagatacctaaccttcaacaaatgttatttttggaaacacaatttttgtcattaaatgttatattatttcacatatataaaacagatgttatgnaanaatgttantnnattttaacataaatcatttagagaaattatctagattcattaattttcatagtgcctttttcacatgagtcag

SEQ ID NO: 735 - DNA, 266 bp, Homo sapiens
  misc_feature 8, 9, 14: n = A,T,C or G
cacctatnnagatnttcaattccttgagtctgagcttgtgggtggaattctaaatttgtatcataatctgtcttttgtgaaacattttgaaaatatgtatatataatattgtatatgcaaattgtgttgtttcacttgtaaagggaaaaggcttatttttctttatatttctgataacttgttttgcatatgaccagcactgactgaaaggcatgtgtagctgcaaacactgttgctttttttgtgaaatgaaaataaaagtattt

SEQ ID NO: 736 - DNA, 504 bp, Homo sapiens
ctggagatggagaatgtggcttagatcagtcccttgtttctttagagatgtccgagatccttccagatgaatcaaaattcaatatgtaccggctctactttggaagctcttatgaatcagaacttggaaatggaacctcttctgatttgagctcacaatgtctctctgcaccaagctccatgactcaggatttgcctggagttcctgggaaagaccagttgttttcacagcctccagtgttaaggacagcttcacaagagggttgccaagaacttacacaagaacaaagagatcaactgagggcagatatcagtattatcaaaggcagataccggagccaaagaggacgaatccatgaaccaaccaggaccaatcaagaccagactggctattagtcagtcacatttaatgactgcacttggtcacacaagaccatccattagtgaagatgactggaagaattttgctgagctatatgaaagctttcaaaatccaaagaggaga

SEQ ID NO: 737 - DNA, 441 bp, Homo sapiens
aaacaaattttagcccaattttcttgagtcattctctctctgcagcagcagaggaagggcctgtacctccctaccaatgacttggtgtccttattttctaccccaagagcagggatattagctgtgtccaaatgggttctgaattctacagactcatcaacatgaggcaaggaatcattgaaaaccacctgtgtctcctttgggagaatgacatatctttagtatttacgtagcttattcttctatatctacatatgcaaagctttccttaacagtaaagggtacatatgcatagtgggaggagatcagacctttacaagtgagggaaagcaacttcagaaatgaattattttctttgctttattatttttaccaagacagagaagtattgtattgagagataatctattttcataatcaatatgtgcctaaattatattt

SEQ ID NO: 738 - DNA, 254 bp, Homo sapiens
cctgccagatatttgtgagaaatctgccattcgatttcacatggaagatgctaaaggacaaattcaacgagtgcggccacgtgctgtacgccgacatcaagatggagaatgggaagtccaaggggtgtggtgtggttaagttcgagtcgccagaggtggccgagagagcctgccggatgatgaatggcatgaagctgagtggccgagagattgacgttcgaattgatagaaacgcttaagcagttgcctttttt

SEQ ID NO: 739 - DNA, 488 bp, Homo sapiens
  misc_feature 40, 42, 49, 62, 71, 74, 79, 117, 178, 289, 296, 318, 333,339, 345, 364, 372, 469, 478: n = A,T,C or G
gcgctacgatcaaaactactgaattagtagaaataatgangnctaaagnttaccaacaaaanaaccctcancanaatancaaaaactttgctcaggacatttgaggtcaaattgaanacggaaaccggaaaccgttttcttgtaagcccctagaggcagatcaggtaaagcatacatngtagagggaaaggagagaatggaaataaaactcaatattatgcagatttatgccttattttttagcattttttaaggttgggtctttcaggctggttttggtttgtattanatctgtntagtttaattaactggtgattnagttttatatttaanctacanttaatnttttttctttggtgatatntatttctntgccttttttttttttaacaactttcaatcttcagatgtttcgttgaatctatttagagcttcaccatggcaatatgtatttcccttaaaacactgnaaacaaatntactaggagt

SEQ ID NO: 740 - DNA, 563 bp, Homo sapiens
  misc_feature 108, 140: n = A,T,C or G
cgaggtggagcgcgacaacctggccgaggacatcatgcgcctccgggagaaattgcaggaggagatgcttcagagagaggaagccgaaaacaccctgcaatctttcanacaggatgttgacaatgcgtctctggcacgtnttgaccttgaacgcaaagtggaatctttgcaagaagagattgcctttttgaagaaactccacgaagaggaaatccaggagctgcaggctcagattcaggaacagcatgtccaaatcgatgtggatgtttccaagcctgacctcacggctgccctgcgtgacgtacgtcagcaatatgaaagtgtggctgccaagaacctgcaggaggcagaagaatggtacaaatccaagtttgctgacctctctgaggctgccaaccggaacaatgacgccctgcgccaggcaaagcaggagtccactgagtaccggagacaggtgcagtccctcacctgtgaagtggatgcccttaaaggaaccaatgagtccctggaacgccagatgcgtgaaatggaagagaactttgccgttgaagctgctaactacc

SEQ ID NO: 741 - DNA, 470 bp, Homo sapiens
  misc_feature 291: n = A,T,C or G
gccagtttctctgccttcttccaggatcaggggttagggtgcaagaagccatttagggcagcaaaacaagtgacatgaagggagggtccctgtgtgtgtgtgtgctgatgtttcctgggtgccctggctccttgcagcagggctgggcctgcgagacccaaggctcactgcagcgcgctcctgacccctccctgcaggggctacgttagcagcccagcacgtagcttgcctaatggctttcactttctcttttgttttttttgtacaagcttttttttttttttttttttncaagtatatttactctttattgcattccttcatttgcattaaacaatattttttcaatacagttttggacaaaacacaaagacattaagctcatttaacaagagacataagttaacacaatgtgtgctgctttcatgaggaggaaagaggcaagatcttagaggaatccaggatactgg

SEQ ID NO: 742 - DNA, 488 bp, Homo sapiens
aaaatatttgcttgattatatgtaacttaagataaagttaatgtcttatttttacatcacagtacacatagcatttcttaatttagcaacggaaaggcacaattagcaagcaataaaattcagtacctgaattattaaactgacatccagaatagctgcaaataaagttcattcaaaacagtatacagaacttaaaaaaaaatccaaaaactaatttttctaaaaatttggtccattaaaaatgcctcccatgttcaacatcatggataacatgaaaggtaatggcagtgtaaaaacaggcagtaaatcaatgtatagtagcatatacattctggtctagtaattacgcaattcaattaggaaatggctcccatagtaaataaatgttaaatatatctgttaataacaacatacctgtatgtagttcaaatacacaggcacaactgtttgcatattattattgattttataatacactcccatagttt

SEQ ID NO: 743 - DNA, 254 bp, Homo sapiens
ctgaagttcatcgccaggactgtgatggtacaggaagggaacgtggaaagcgcatacaggaccctaaacagaatcctcactatggatgggctcattgaggacattaagcatcggcggtattatgagaagccgtgccgccagcgacagagggaaagctatgaaaggtgccggcggatctacaacatggaaatggctcgcaagatcaacttcttgatgcgaaagaatcgggcagatccgtggcagggctgctgagg

SEQ ID NO: 744 - DNA, 121 bp, Homo sapiens
aaaaaaagcctctttcagtgcaagtggggtgccaaggatgtagaataaataagagggggccaggatcagtgcacagggaggaagcgctcacggacgctccgctccagcccgggcatcctgg

SEQ ID NO: 745 - DNA, 164 bp, Homo sapiens
gttcgtaccgcttccttagaacttctacagaagccaagctccctggagccctgttggcagctctagctttgcagtcgtgtaattggcccaagtcattgtttttctcgcctcactttccaccaagtgtctagagtcatgtgagcctcgtgtcatctccggggtgg

SEQ ID NO: 746 - DNA, 534 bp, Homo sapiens
  misc_feature 513: n = A,T,C or G
cttttttcccagtcctgcaacctggattttctgcctcagctccattttgctgaaaataatgactttctgaataaagatggcaacacaattttttctccattttcagttcttacctgggaacctaattccccagaagctaaaaaactagacattagttgttttggttgctttgttggaatggaatttaaatttaaaaaaaaacacacttccgctgggcaggtttagaggtttattatcagtctgtgcataactaaaagttcaaagcaaattcaattttgcttaagggaacattgtaaagtaacaattcttggtattacatgcctcgtatgatccatttcaaaccatagagaattacacctttgtgtcactgtttcaagagacaaacagatttgaacagctaaaacatcttaaaaatgcaccaagcttatgaagtctcaaacaaaacttgaattttctgtacatactcctgtcaaatgaagtaatttcctgtacaccacttctcttgcaaactgncttctatttcctttcatacct

SEQ ID NO: 747 - DNA, 542 bp, Homo sapiens
aaactgaaatgaattttaatacagaaaatgaagacagcattttgcaaatttatcactcaaaggggtatctctatttgaggaaatcagcgtgttacactttgaaagatgaaatgttacagcttgtacaccaaaattaaaaaatgaaattaaattaaaaaatgaaatggttaccaaggtaatgcaggtcaggggatcaaaggtgaagggtcacacattattaaaaagaaatccaaaaggacggctgcatcatgatctctcgttagtgttccagcggtgcctctcttttggtaaacttgaacatttcggcagacattcaagcagctttttcggtaaaaagatttttacatgactactattgctgttcccatgatcatcttctataggtggcacggtgttgagaacacagtaggtgctagttccgcagaatacactttgggaaacgctcttccggcttgttttcggcagccatttcccctccgcgcgccacatcctcctcctcctcgcgaccgggaccccgagcgcgcgcctcgtaccgccgccgc

SEQ ID NO: 748 - DNA, 270 bp, Homo sapiens
ccacagcctctcctgcccgggatgacaaagcctcctatgttgcctggggacacagcaccgtggtgaacccttggggggaggttctagccaaagctggcacagaagaagcaatcgtgtattcagacatagacctgaagaagctggctgaaatacgccagcaaatccccgtttttagacagaagcgatcagacctctatgctgtggagatgaaaaagccctaaagtttatgtttctaatgtgtcacagaataggacgatatgattctacaac

SEQ ID NO: 749 - DNA, 416 bp, Homo sapiens; identical to SEQ ID NO: 258

SEQ ID NO: 750 - DNA, 230 bp, Homo sapiens
attttttacattgaacttttcttcacttgtatataaagattatatataagtacttatttatgagtataagaaaggttaggcatattttcattaactgaataaacgacttgatttatataacctggtttatcaaaatttaacatggcttcagtatgagatctttttcaaaactattttcttaaacatttatttcatgagattatgttcaaccctgtacctggtgtaatttt

SEQ ID NO: 751 - DNA, 266 bp, Homo sapiens
  misc_feature 95: n = A,T,C or G
aaaagatcatgcttataataagtaaattacacattaaggaaacatcaaaataaagtagatgaataaaaaggcacactcgaaaaatttgagcgcanaaaggacagttctttttgttttgtttctaatgtcggaagaaaaagaaagagatatattaaaatcattgttttcaagtgaaggtttctgtcagttgaagtagttagcaatggcttcttttctcccgtgtccaaagcaggctcttcctgcgctgacttctgaggaggtgttca

SEQ ID NO: 752 - DNA, 368 bp, Homo sapiens
cttatttgtagttgttagttgccctgctacctagtttgttagtgcatttgagcacacattttaattttcctctaattaaaatgtgcagtattttcagtgtcaaatatatttaactatttagagaatgatttccacctttatgttttaatatcctaggcatctgctgtaataatattttagaaaatgtttggaatttaagaaataacttgtgttactaatttgtataacccatatctgtgcaatggaatataaatatcacaaagttgtttaactagactgcgtgttgtttttcccgtataataaaaccaaagaatagtttggttcttcaaatcttaagagaatccacataaaagaagaaactatttttt

SEQ ID NO: 753 - DNA, 278 bp, Homo sapiens
ctgccaaatgcagggctgtgcggccacttttgcgatccttgtcaaaggcaagagggaggaaaaaaaaaaaaaagaaaatccagatactatgcctcagaatacacttttcacccagtctcctgaatgtctgattcagcttcagagactcactttgaatgctcccttctccaaaatgccttgcttaatcccaagctaaatggaatcttttattcctcttaaatttcctattaatttgtctatatgcctcttgtcacaatgtacctttttatacagggtgg

SEQ ID NO: 754 - DNA, 458 bp, Homo sapiens
ccagtattctgtggtcctgtgaactcagacttaaagcctgggggaggaggtcctgctgagttggtgaatctctggtaacggtgggaaaatggaggatactcagagtacggtggaggagaatactgcccgtcactcaggaacagcttatagactacaaaggcgatcccaaggagtaccacgatggtaatcaatccactcatgttacaggaatccgccgaggaccacttataataataatcagagaaagaggcaaagccgtgctgctttccagactccttcagtttctgcaggccaagttctgtataatctaaattatactccaagccacaagaacctcttagtacatactggtcttcagaggactcatagccttcacagctcaccacagtttttccaaatttgtatgcaatatctaagtccgtcttacattcccactgtacatcatacccatcccagac

SEQ ID NO: 755 - DNA, 237 bp, Homo sapiens
ccatgggcccgttcattgccttgcacgtagagcaaagagtacccgtggtaaagaattttggtcccagaaggacactgtgggtcatctattgtttgactatgcctggtcacaaggaagccgtgatcaacagatggggtgcctgggggccccatggatcctggcaacccatcggggcctggtggacctggaaatcctcttggaccagtaggcccggcaggtcccatctctcctttctgg

SEQ ID NO: 756 - DNA, 523 bp, Homo sapiens
  misc_feature 251: n = A,T,C or G
aaaacaagcaaattttattaaaggaaaattttgcaggtttaaggtttgcaggtgaaattttgtaggtgaaatggtttacttttcaccagtctgttctggcatgcttctaatgatgtcagagtcacctggatcaatgatagccagtgtgcacactctgtagtattttccgcatgctgtgcccagttcaatattattgccactgtagtgatggacaccagttttagccaacatagcatagtactctatttcanatttcttcaaagctgggcagttgttagcgagaatgaccaatttcgctttgccttgtctgatcatcttcagagtctgcttgtaccccaggacgtacttcccacttttcataacgagttggagcctagagttgatcgactccagcgactttttcgtcttctttgcggccaccatcttcctgccttaggagcgggacggcccccaacctttaatcccagcactttcggaggttgaggcgggaagatctgttgcgtccagctcaaggccagcctgg

SEQ ID NO: 757 - DNA, 293 bp, Homo sapiens
aaaattctagaccccaaaaaactacaaaatcagaaaaagtatttttatgtttctagcttgaggagaagggctttagggctaaccagaggtctgaccctagaatgccaaggaactgagaatgggctccgatgaaaaccttccttttcagattccctgtctgctcaattaaagatgtttgtatccaaaggaagtcaaggaagaaaaagtgtggaaaggaagagaactgattcctactgaaaattcaaattctattaccattctaactttcataaaaagttgggatcaagaagcag

SEQ ID NO: 758 - DNA, 340 bp, Homo sapiens
ccacctacgaaagacaagttaacaaactgtcatggaggctgttgttgcccagccagggccgctgcattttgacaacatttccaccctggccactcagcacatttcatggaggtcatgtcttttcactgatacttttttgatagtttttatataacaaaatccttattctatttatagcttaagatgataaggcactataaattaatgacctaaaataatatatttgtctgttatcttttgctatttctacttcactttaatttttagctgtaaaattggtaaatggattcttacaactatctctttccatttcttactatttggttttcaaatttcattt

SEQ ID NO: 759 - DNA, 490 bp, Homo sapiens
aaaataaatattttcattttccgatgtctactttcatgtcttcagagtgtcacaggaaatcgaagcctatcatgaattacaattttttttagagtcccggctcactgtgtttggtaacttgccataccatatccggcttggttaggaggaggtattacagggggaggagcttgtccttggggaggctgagcaccaaatccacccatccaagcagcagaaggtgattgatctactccaaatccttgttgattccatggttgcccgtatactccataaggcggtacttgccacccatttgccatatactgtccatactgttgtgggtttccatacacttggctccattggccccattgactatagtcaacctgttggaagtttttagtcatatcaggagattctttaccccaatagcatttaaccacatgtccttcaatcgtagtaccgttcaccgaaacaatggcatgggctgcactttcatgggttgaaa

SEQ ID NO: 760 - DNA, 436 bp, Homo sapiens
  misc_feature 152, 283, 303, 318, 377: n = A,T,C or G
ccatggccctgatgggtggcatcattgtggggctcattttgagattaccattctggggacaaccttcagatgagaactgctttgaggatgcggtctactgggagatgcctgaagggaacagcactgtctacatccctgaggaccccaccttnaagccctcaggaccctcagtaccctcagtacccatggtgtccccactacccatggcttcctcggtacccttggtaccctaggctcccagggcaggtgaggagcaggctccacagactgtcctggggcccanaggagctggtgctgacctanctagggatgcaagantgagcaagcagcacccccacctgctggcttggcctcaaggtgcctccacccctgccctncccttcatcccagggggtctgactgagaatggagaaggagaagctacaaagtgggcatc

SEQ ID NO: 761 - DNA, 272 bp, Homo sapiens
ctgccagaacatcccatagaaaaacaattttgtaggaacgtgatggcaacaatcagcagccaatattctcaagagttcctaattaccaaaagcatatacaattttagtctagaaaaataagtcaattttataaaattaagtttttagatcgaaaagcaccccctttaacaggtacagagatactgaaaaatagtccctaaaaatctcactaaatagtttacggagagaaaggcatgccatgttgagttacggagtgcagcgcgtgccctcag

SEQ ID NO: 762 - DNA, 346 bp, Homo sapiens
aaatgtagcttgtcataacaaaattttaattacaattggcctgtatgagaagaaaaagtatttttattgttttgagtgatgacgcagagactcaatgaacttgaaaatagcattgcttcgtgcactttgaataccaatcaggtgttttctgtgctactagttgtcacgttgcattcatgttcacctcctgatttaagtatctcgggtgtgcccagccactaaagcactctggactaatcgctaaagagaagcaacgtggggggtggggttgcgagggatgtgttcacatgtacccatcatttgatcatagcactgtgattgcttttgatgtgtgtctctagtggtg

SEQ ID NO: 763 - DNA, 503 bp, Homo sapiens
  misc_feature 444: n = A,T,C or G
aaacaaatatacttatgcatagagaaaatctggaaaaatatatgccagctataaagtggttcttgctcatgggataaattgtgggagactttttccctttttgcttctctgtgttgtgatttcctaaagacagggcagtggtgtccctagactgctctggaactgcaggacctaacagcctcactgtgtctgctcacccaagtctgacaggtggcagggcagtgtctgaggcccactgggatgcagacccaggaaagctggggtggggggcttctggtccccatctctgcagcctcatcctctccccagctacacagacccagatggtcactgtcctggaccagatgaaggcaggcacctacaagctcaccttcgacactgagggttactggaggaagagggggcaggaaagcttctacccacatgtggaggtgagagccccantgggctggagggggcttgaggctcatgactcactgggatctgcaggccaggtcctgctg

SEQ ID NO: 764 - DNA, 170 bp, Homo sapiens
aaagaaaaaaaatgtatatacagaaagagtataaaagtttgtgaatttaatgcaaattagcttccagtcttcacttcccaaatacttgatttatagttttgactcctttacatttttgccttcttaatttcaagatttgcaattttgccttcaaaacagatcattttttt

SEQ ID NO: 765 - DNA, 552 bp, Homo sapiens
aaaatcatctttacccaacttatctgtgaagtaatggcaaaagaacatctccaaattaagtactccttttcttcaaaggagtttcatgggatgtacagctagtataaaataaaaatatgggaagatgtccaatcttaaaaaccataagggcaaattaagacaaaactaagctgcccagagcagggtgagtggaaccagttttatgaataaagatgcttgtctcagcactatatgtggatatcaaaaattgtgaacaacttgaacacctatcaggaggagaatactttaatcaattatggcacattcaggagataatgttttacagtcatcaaaaattgtatatgagggccagcacggtggctcacacctgtaatcccagcactttgggaggccaaggcaggcggaccacctgaggtcaggagttcgagaccagactggctaacatggtaaaaccctgtttctactaaaaatacaaaaaagtaaccgggtgtggtggcacgtgcctgtaatcccagctactcgggaggctgaggcaggagaatcgcttgaacc

SEQ ID NO: 766 - DNA, 543 bp, Homo sapiens
aaagttcttttacctgcagacctgaaaaatctatagaactgtttacatattttgtatatctcttcactaggtgaactttcatgggctaaacagtacattcgagtgaaattctgaagaaacattttaaggaaaaacagtggaaaagtatattaatctggaatcagtgaagaaaccaagaccaacacctcttactcattattcctttacatgcagaatagaggcatttatgcaaattgaactgcaggtttttcagcatatacacaatgtcttgtgcaacagaaaaacatgttggggaaatattcctcagtggagagtcgttctcatgctgacggggagaacgaaagtgacaggggtttcctcgtaagttttgtatgaaatatctctacaaacctcaattagttctactctacactttcactatcatcaacactgagactatcctgtctcacctacaaatgtggaaactttacattgttcgatttttcagcagactttgttttattaaatttttattagtgttaagaatgctaaatttatgtttca

SEQ ID NO: 767 - DNA, 527 bp, Homo sapiens
aaagtttctaattcacacaaaacacaaacatacacacactttctttcattccacacaaaacccaaaggtacaaggtggttttggaaaacaaacattttacattgcttcacctatgtggaccccaactaattagctgataatacattgaatagctataatataaagactattttgatatgaatcacatgagtaatacaggatgtgtttagagttccagagaaaaaacacaagtacttctacatgaaataattagaaaaacttaattaggcaggtaacatgatatgagatgaaagctttgattggacctaggcagtgtgtggtaaagaagggattttccaataaagaacagaatgagtaaaggtcatggatatatgaagagcatcccaatgtgtatggatcacagagaaatttgagggcaagctattaaaaaagacagttaatttggaatgaagaccttaggcagtcttaattgtcatactatggatttggattttaatacatgaccaaaatttacttacacaactttt

SEQ ID NO: 768 - DNA, 280 bp, Homo sapiens
cggccgaggtaaaaaataggctacttattaagtgtgcttgaacaaaccatgtgtggaattgaattccattcattacggagttagtttctgctaaatacttactgatgctagagcagacccctggcatctgaggatttaagagttcaactgttctcaatctatgctaaaaaaaaaaaatgacaaataataaattctacatttccgaggcactaatttgaacttcagaagtgggagggctgatatgtaaggcaagttatttaggaatgaggagggctgacag

SEQ ID NO: 769 - DNA, 475 bp, Homo sapiens
ctgtagctttttcattcagaaactggagaccatcttttcactgagttgttattccttcctcttcccttagcttagggatatgttgaaaaaggcttttcaacaagtattttattttttacaagttgctatgaaattaaaatttatatatatatcttaagtgtttataaagcactcaaaattgtagcttacatgtatatgacttctgaaaataaaaatcacacttctaacataatctttctgctctgcaaaaatattctacatacatgcatatgatcaaaacaatcttttcatgtttggggtatttcttacacatagtaaaagaaaagtcaacaattgtatcagtacttcccctgttaagataactgagtgccacctagtgttcaatttctgcaactactaagcttacaaattcaatactgctattaaaacccaggttctgaaaacggcattttggaaatctttttttttttttttt

SEQ ID NO: 770 - DNA, 323 bp, Homo sapiens
  misc_feature 9, 26, 27, 29, 55, 59, 74, 117, 154, 235, 237, 313: n = A,T,C or G
cccactcanaaaggacacttctgatnnanacggttgaaactagagatggacaggntatnaacgaaacttctcancatcacgatgaccttgaataaaaattgcacacactcagtgcancaatatattaccagcaagaataaaaaagaaatccatntcttaaagaagcagctttcaagtgcctttctgcagtttttcaggagcgcaagatagatttggaataggaataagctctagntnttaacaaccgacactcctacaagatttagaaaaaagtttacaacataatctagtttacagaaaaatcttgtgctanaatacttttt

SEQ ID NO: 771 - DNA, 126 bp, Homo sapiens
  misc_feature 24, 65, 75: n = A,T,C or G
ctgactacaccgccctgtgcccanggtgtcatctggactgtgtttaaccagacagtgatgctgantgctaagcanctccacaccctctctgacaccctgtggggacctggtgactctcggctacag

SEQ ID NO: 772 - DNA, 545 bp, Homo sapiens
ccatggtagacaacctgcagggggactctggccgcggctactacctggagatgctgatcgggacccccccgcagaagctacagattctcgttgacactggaagcagtaactttgccgtggcaggaaccccgcactcctacatagacacgtactttgacacagagaggtctagcacataccgctccaagggctttgacgtcacagtgaagtacacacaaggaagctggacgggcttcgttggggaagacctcgtcaccacccccaaaggcttcaatacttcttttcttgtcaacattgccactatttttgaatcagagaatttctttttgcctgggattaaatggaatggaatacttggcctagcttatgccacacttgccaagccatcaagttctctggagaccttcttcgactccctggtgacacaagcaaacatccccaacgttttctccatgcagatgtgtggagccggcttgcccgttgctggatctgggaccaacggaggtcttgggtggaattgaaccaagtttgtataaaggagacat

SEQ ID NO: 773 - DNA, 337 bp, Homo sapiens
gaagaacaattaagaataatggatcagaccttgaaagcattaatggctgcagaggataagtactcgcagaaggaagacagatatgaggaagagatcaaggtcctttccgacaagctgaaggaggctgagactcgggctgagtttgcggagaggtcagtaactaaattggagaaaagcattgatgacttagaagagaaagtggctcatgccaaagaagaaaaccttagtatgcatcagatgctggatcagactttactggagttaaacaacatgtgaaaacctccttagctacgaccacattctttcattttgttttgttttgttttgttttgttttt

SEQ ID NO: 774 - DNA, 462 bp, Homo sapiens
cctagctctgtctcctggacttagagatttcagacacagaagtctgtccatggctccttgtcacatccgcaaataccaggagagcgaccgccagtgggttgtgggcttgctctcccgggggatggccgagcatgccccagccaccttccggcaattgctgaagctgcctcgaaccctcatactcttacttgggggcccctcgccctactcctggtctctggatcctggcttctagccctcgtgttcagcatcagcctcttccctgccctgtggttccttgccaaaaaaccctggacggagtatgtggacatgacattgtgcacagacatgtctgacattaccaaatcctacctgagtgagcgtggctcctgcttctgggtggctgagtctgaagagaaggtggtgggcatggtaggagctctgcctgttgatgatcccaccttgagggagaagcggttgcag

SEQ ID NO: 775 - DNA, 310 bp, Homo sapiens
ctgtcagattaaatagcattataatattttgttgtaatcataaatgcaggtttatgtcccatgtaaggaaacttagtgggagagtaacagaatgcctggagagcctgactctgagctcttgaagtagtcagccagtttgtggtaaaatggtaattgaattttcctaactgcatcaactgtaatgatatactcccttctcctcctttatttagttaaaattgtaggctgatttctttttacctacaatcttcctaataatttttgatgataatgacccctcatttctttctgcccaaagacctcattcttt

SEQ ID NO: 776 - DNA, 536 bp, Homo sapiens
cttggagcagactaccatgacaagccagtctcaggggatccaccagcttcttcaggcagaaaaacgggccaaggacaagctagaggaagccaagaagagaaaaggaaagcgattgaagcaagccaaggaggaagcaatggtagaaattgaccagtacagaatgcagagagataaagagtttcgactaaaacaatctaagataatgggctctcagaataatctctcagatgaaatagaagaacaaacactagggaagatacaagaacttaatggacactacaataagtatatggaaagtgtgatgaaccagctcttgagcatggtctgtgacatgaaaccagaaatccatgtgaactacagagccaccaactaaatgtacatcacagttttcaagaaaaaaaaaggtgtgtgagtgccacctggttgcttatggcttcgtatttttatgttgagaaatttgaaatgagaaccttaaatttacatttacaggaaatgtgacataactcatacatcggcactgaattaaacaaaacaaa

SEQ ID NO: 777 - DNA, 548 bp, Homo sapiens
ccagggagtctccactgaacaaacaaaatggcggtcaaaagtcttgagtgtcctattccagcagcccagagtcctcatccgtcatccacgggagagtctttgagggaaacatgaagtccagctcatgcctctgcctatgggtcaatttcttcgggaatcactgtgatcatgatatcttcattacccctgcggaccaccatgttcagggtgctttcccttttaatgacgtcgctgacatcattggcggagaccacggactgtccattgatgctgattatgacgtcgttttccttgagaccaccagcttctgctggggtatcaggaattacttcaattatatacgctcctgagatcacgtctgggaagtcccggtgccggtccttcagctctttggctttgctggacgtgagtgacatcattcggataccaatatacttcttcttggtgatggcttttcctttggctgtatacagaaacgtaggtcattcttttcagccctaatggagatgtaattaacagtatcgagcactctggaaaatcactctgca

SEQ ID NO: 778 - DNA, 274 bp, Homo sapiens
ccaggatatattggttttttatgttaactttggtgaccttttgtgtactttacatgaaacaccttatatattaagtactggggattcgttctatgttccttcaggtaactattataacatcaaaaatctccggaatgaggaaagtgttcttctttttactcagataaaaagatgaaagatcaaccaaccttaaatatatgtatgtatatatgtatatgtgaaaaacagtttgtatagttggaatatttgtctttgtaattacttgtgatgtttt

SEQ ID NO: 779 - DNA, 326 bp, Homo sapiens
gccactggtgcggctggaggtggcagatgagtgggtgcggcccgagcaggcggtggtgaggtaccgcatggaaacagtgttcgcccgcagctcctgggactggatcggcttataccgggtgggtttccgccattgcaaggactatgtggcttatgtctgggccaaacatgaagatgtggatgggaatacctaccaggtaacattcagtgaggaatcactgcccaagggccatggagacttcatcctgggctactatagtcacaaccacagcatcctcatcggcatcactgaacccttccagatctcgctgccttcctcggagttgg

SEQ ID NO: 780 - DNA, 550 bp, Homo sapiens
ctgtgccctctccaacaactttgcccggtcattccaccccatgctcagatacacgaatggccctcctccactctgaactaagcagatgccatctgcagaagtgctggtagcataaggaggatcgggtcataagcaatcccaaactaccaacaagaggaccttgatcttggcgaaagccctcggtgtggcagctttagccctcctccagatcacatgtgtgcaaattatggcttcagaggtggaagataaacagtgacgggggaacaaacagacaacaagaaggtttggaagaaatctggtttgagactctgaaccttagcactaaggagattgagtaaggacctccaaagttccccggactcatgaattctgggcccttggcccattctgtgcacagccaaggacttcagtagaccatctgggcagctttcccatggtgctgctccaaccatcagataaatgaccctcccaagcaccatgtcagtgtcgtacaatctaccaaccaaccagtgctgaagagattttagaaccttgtaacatacaattttta

SEQ ID NO: 781 - DNA, 225 bp, Homo sapiens
  misc_feature 213: n = A,T,C or G
ccaatgtggttggtcttcagcttgcagttagccaggttccataccttgaccagcttgtcccagccacaggagacgatgatagggttgctgctgttgggcgagaagcggacacaagttttgtacaagcttttttttttttgtttgttttttttttttttttttttttttttttttttttttttttttttttttttttttttttttttttttttnaaaaaaaaaaaa

SEQ ID NO: 782 - DNA, 314 bp, Homo sapiens
ctgtagcggtaaaggagccacagcttgctgaagtagttgcggctgaccttgaccatctctcccttataccggatgcagaccacgttgttctccatgtgcatctccacgctgggcatgggcggtgcagacacagccagccggactgggtagcagtacactaggcggggctccacctcaggggcctccacctcctctgagatgttgttttccttgaggatggcaaggtgcttctctcggatccgtttgacgtactccagggagatgtggtagatcttactgcagatgccttccacggagtccttggctgcggccga

SEQ ID NO: 783 - DNA, 359 bp, Homo sapiens
tggtgatgctgtatcctgagttgtagcctctgtaattgtgaatattaactgagatagtgaaacatggtgtccggttttctattgcattttttcaagtggaaaagttaactaaatggttgacacacaaaaattggtggagaaattgtgcatatgccaattttttgttaaaaccttttgttttgaactatactgctttgagatctcatttcagaagaacggcatgaacagtcttcagccacagttgtgatggttgttaaatgctcacaattgtgcattcttagggtttttccatccctggggtttgcaagttgttcacttaaaacattcttaaaatggttggcttcttgtctgcaagccag

SEQ ID NO: 784 - DNA, 245 bp, Homo sapiens
aaacatcgtatgcgcataaagaaaaaggaaacaagaattaggggaaaataacattttccaaataattataaaaaattgtcctgcgtctatgtatctatatctgttttgtatttttttctggttccaaaccagatttcctgtgattctatactaataatttttgatataaccctttgcttcttataatgagtgcgatatatgttgtcgaggctgttcttcaagaattaaaattgaagtgaaaattt

SEQ ID NO: 785 - DNA, 507 bp, Homo sapiens
ctgactcatgtgaaaaaggcactatgaaaattaatgaatctagataatttctctaaatgatttatgttaaaatatacaacattcttacataacatctgttttatatatgtgaaataatataacatttaatgacaaaaattgtgtttccaaaaataacatttgttgaaggttaggtatctttcttttctctatgtggaatctttcacaggattaaaatatgtgtaaattaagtgcttcttattaccagaaatacttgacacagataaacacataaaatggccccacttccttttaactactcatatcaacattcagaactgaggctttcattaagcaaaatactgtaatgcacaccaatgcagactacttcctttgctagattttgagaagacatgacctctttcgcatttgtgctttctcatatataagaacacagtatacataataagcagaatataaactaaatcaaaatacaagctatacaaggagttgcaatcaacagagcca

SEQ ID NO: 786 - DNA, 343 bp, Homo sapiens
aaattaaatatttgaatataaaatagctctaagaaagaagcaaattatcactgaacatatttcttattatttctggctttgaattatacgtaacttaaattgtcttaaatgatacagaatattggagaatatgatactttcacataatatactatgaacctgttcatataactctgattgactactaacttctgttttatgtatttattaaagaactgacactgtagtttgtggtgagatgtttatttttctaacagagcttataacagttaggacaaggcatttaattaatgcatcattctgtttagtagtaggtgttaatcaatatgaaattctctgtttt

SEQ ID NO: 787 - DNA, 169 bp, Homo sapiens
tttgtttggggtgtgggtgttatcaagtgaattagtcacttgaaagatgggcgtcagacttgcatacgcagcagatcagcatccttcgctgccccttagcaacttaggtggttgatttgaaactgtgaaggtgtgattttttcaggagctggaagtcttagaaaagcct

SEQ ID NO: 788 - DNA, 237 bp, Homo sapiens; identical to SEQ ID NO: 755

SEQ ID NO: 789 - DNA, 445 bp, Homo sapiens
cctcagaatgaggctgctttattggaagctattctaacatcactttccagactgtctcactgtcttgggaccaggcatgggaggcaggggtgggaatcttcttgtgattgtgggtggtggctggaggagtggagtggtgggaggcggctcagtcgcgggcactcctgcgactggcggatgcggtccggatggaataagccttcaggagcccaggacccgcactgctggagaagctcagggcattgctgcccatggttcccccgagggtcagcccaatgccaccgccactgctactgccaccagtggaattcatcacagagatattcacggctcccactccatctccagccaaccggctctcctcgccctccagcagcttgcggtaggtggcgatctcgatgtccagggccagcttcacgctcatgagttcctggtactcacgcag

SEQ ID NO: 790 - DNA, 557 bp, Homo sapiens
  misc_feature 390, 468, 510, 527, 541: n = A,T,C or G
aaagatatctttctcctcttgatcaatctatcaatattgatagaagtcacactagtatataccatttaatacatttacactttcttatttaagaagatattgaatgcaaaataattgacatatagaactttacaaacatatgtccaaggactctaaattgagactcttccacatgtacaatctcatcatcctgaagtctataatgaagaaaaagatctagaaactgagttgtggagctgactctaatcaaatgtgatgattggaattagaccatttggcctttgaactttcataggaaaaatgacccaacatttcttagcatgagctacctcatctctagaagctgggatggacttactattcttgtttatattttagatactgaaaggngctatgcttctgttattattccaagactggagataggcagggctaaaaaggtattattatttttcctttaatgatggngctaaaattcttcctataaaattccttaaaaataaagatggnttaatcactaccattgngaaaacataactgntagacttcccgtttct

SEQ ID NO: 791 - DNA, 522 bp, Homo sapiens
  misc_feature 447, 456, 466: n = A,T,C or G
ccaaatgggagagtggttacaacacacgagctacaaactacaatgctggagacagaagcactgattatgggatatttcagatcaatagccgctactggtgtaatgatggcaaaaccccaggagcagttaatgcctgtcatttatcctgcagtgctttgctgcaagataacatcgctgatgctgtagcttgtgcaaagagggttgtccgtgatccacaaggcattagagcatgggtggcatggagaaatcgttgtcaaaacagagatgtccgtcagtatgttcaaggttgtggagtgtaactccagaattttccttcttcagctcattttgtctctctcacattaagggagtaggaattaagtgaaaggtcacactaccattatttccccttcaaacaaataatatttttacagaagcaggagcaaaatatggcctttcttctaaganatataatgntcactaatgngggtattttatattaagcctacaacatttttcagtttgcaaatagaactaatactg

SEQ ID NO: 792 - DNA, 462 bp, Homo sapiens
tgggctggaacgtgaactcagtagctgaacctgtctgacccggtcacgttcttggatcctcagaactctttgctcttgtcggggtgggggtgggaactcacgtggggagcggtggctgagaaaatgtaaggattctggaatacatattccatgggactttccttccctctcctgcttcctcttttcctgctccctaacctttcgccgaatggggcagcaccactgacgtttctgggcggccagtgcggctgccaggttcctgtactactgccttgtacttttcattttggctcaccgtggattttctcataggaagtttggtcagagtgaattgaatattgtaagtcagccactgggacccgaggatttctgggaccccgcagttgggaggaggaagtagtccagccttccaggtggcgtgagaggcaatgactcgttacctgccgcccatcaccttggagg

SEQ ID NO: 793 - DNA, 320 bp, Homo sapiens
  misc_feature 19, 195, 207: n = A,T,C or G
acatattgtaaaactagtnttttccagaagcaatttccattctcttcctttcttcctgcaaactggtgttttatctttacaagttctctgtcattccataagaaagctgaacagtggttaaaacatccagtttgcttgaattcctgagtgattcagattccagtgagattgagggtcattcataacagttacaangctggtgtggtnaagggagaacaaaaataaactgggtttctgcaggtaagtgagaagacaaaatgaagaggaataaggttgtaaggcagtatgattaggcttgtgggtgctatgccttctgataa

SEQ ID NO: 794 - DNA, 543 bp, Homo sapiens
  misc_feature 129, 151, 173, 203, 210, 211, 232, 238, 479, 540: n = A,T,C or G
aaaagcatataccaccttagttcattcatgtatcctggtaaagcatcttaatcagacttatttttaattactgaatatttcttagacgttttgggacagattttatgtaatctttataagtatgatttntgaagaaaagcaaatgcattantatgtttgccttaaacttgtanactaaaccaagtattgtaaaataaacagcnataacanngatagtttttaactctatggncattgnatcactctggaaaatgtggagtagctgtaataaatctactcctgtattatgctttacagtgcaggtcttagtttttcttttttctcatttcttttgaaatggcatctcgaacaaagtccaccaatccctttacaaaagaatgaactgctcctctgtgtgtacttcatagaaggtggaatcggacagaggcaggttagtgacagttattcctgaaatacaggagcagagtacagtctgttgnggtttcccggattccgcgcctagctcagccaattaagcatgagacataggccattgagccnctt

SEQ ID NO: 795 - DNA, 277 bp, Homo sapiens
tttcatcgtgtgtgtctaattttttttcctgttgaatgggtaaaaacaaaacaaaactttttttagaagatgaatttgctgtcatgttttgtggaatgagggaccgttgagctcactaccacctggagtttgagttgaagcatgaaaatggtgcccatgcctgacgctccagcgcctggatctgcacgtgcccttgtagaggatccttaccgtcctagagagcagacgctttctgaaaactacttgctccaaaagaccctctgagttaacgtttcag

SEQ ID NO: 796 - DNA, 566 bp, Homo sapiens
gctgccccaggcgcgcaagcgacagcgcctcacgcacctgagccccgaggagaaggcgctgaggaggaaactgaaaaacagagtagcagctcagactgccagagatcgaaagaaggctcgaatgagtgagctggaacagcaagtggtagatttagaagaagagaaccaaaaacttttgctagaaaatcagcttttacgagagaaaactcatggccttgtagttgagaaccaggagttaagacagcgcttggggatggatgccctggttgctgaagaggaggcggaagccaaggggaatgaagtgaggccagtggccgggtctgctgagtccgcagcactcagactacgtgcacctctgcagcaggtgcaggcccagttgtcacccctccagaacatctccccatggattctggcggtattgactcttcagattcagagtctgatatcctgttgggcattctggacaacttggacccagtcatgttcttcaaatgcccttccccagagcctgccagcctggaggagctcccagaggtctacccagaaggacccagttccttaccagc

SEQ ID NO: 797 - DNA, 376 bp, Homo sapiens
aaaaataaagtaccttaattctttattgactttttgccctaaattgctaggtgtgacccagcaatcttttaggaagagattttacagtggtgctttatttatatcaataatccagtatagttaggctgttcattcctcataatagagtacataacagaaaagtgggactttcacattttcatatttaggcacgttccaatttaattccaaaaatactctgtaattctacatctaaaaaaaccgattccctaattcgaatttattggtaccaaagctctctttggctatagacaattaatagttgaccttttaagttaatgtatatgcttaaaaacagttttaggaaaatatttggtagacaaagagtttcaacttt

SEQ ID NO: 798 - DNA, 557 bp, Homo sapiens
aaagccatttttgctttgctgtcattggtccttatccaatacagatcaacatatcatccagcacagccaagcacccactgaggccaagcagccttgtgggacatgggccctgtcagagcaggccctactttcagttaaatactttggagagtccaggattctgtctctctccctcaacaagattaatgccataagggaagttgcaagcgtgttagaaacatttttaacctgaaagtaaagtgaacagaaatattttttttccgagacctctgctatgcaccataatattaccatatcagggtttttagcttcaaagttgaaaaacagattggtactaacagtccttctagagatcatttatgggcgctggtagagtcagggcattcaaaacattcaacgggtaaaaggaggatttgctagattcagaaatgcgctacaattctgaagacaccatggctgaaagttctaggggtgttggtggcagctcatattaggtctggcatacataactaccttttgctatagctgaaaactttaagggaaaaagttatattttt

SEQ ID NO: 799 - DNA, 121 bp, Homo sapiens
  misc_feature 67: n = A,T,C or G
aaagtttctggcattagcagatgatttctgttcacctggtaagaaaagaatgataggcttgtcagancctatagccagaactcagaaaaaattcaaatgcacttatgttctcattctatgg

SEQ ID NO: 800 - DNA, 379 bp, Homo sapiens
cttttcctccctgaacctgagggaaactaatctggattcactccctctggttgatacccactcaaaaaggacacttctgattaagacggttgaaactagagatggacaggttatcaacgaaacttctcagcatcacgatgaccttgaataaaaattgcacacactcagtgcagcaatatattaccagcaagaataaaaaagaaatccatatcttaaagaaacagctttcaagtgcctttctgcagtttttcaggagcgcaagatagatttggaataggaataagctctagttcttaacaaccgacactcctacaagatttagaaaaaagtttacaacataatctagtttacagaaaaatcttgtgctagaatacttttt

SEQ ID NO: 801 - DNA, 431 bp, Homo sapiens
  misc_feature 398: n = A,T,C or G
aaaggcttatgatacaggggcggggcgagtctcttggtacaataaaactgtacaggttaagaagtgccacctccctcctgggtggggaggggccaggcgtggccgggcgacagtttcagcaccattggggttttctgtagtgtgagggtttggaccagggtgggcctgtgccgggccctctccacctggtgcctttgacagacactccgggctgcaaccccacccggctctgttccccaagtctaggccatcctgagagggtgggggcagggcccctggcacagtcaggtaggccagaaaacacaatggcaaccatcattgtttgtttgtttgtttttttgttttgttttaccatcagcctcttacatactgggaatggtaattataattaaaggcanatgatgcgggagggaatgttcaagtccagcttt

SEQ ID NO: 802 - DNA, 311 bp, Homo sapiens
ggccgccatcaaccgccagatcaacctggagctctacgcctcctacgtttacctgtccatgtcttactactttgaccgcgatgatgtggctttgaagaactttgccaaatactttcttcaccaatctcatgaggagagggaacatgctgagaaactgatgaagctgcagaaccaacgaggtggccgaatcttccttcaggatatcaagaaaccagactgtgatgactgggagagcgggctgaatgcaatggagtgtgcattacatttggaaaaaaatgtgaatcagtcactactggaactgcacaaactgg

SEQ ID NO: 803 - DNA, 291 bp, Homo sapiens
aaagcataataaaaaataaattacaatacaaaagtgctctttaggaaggagacactaaacaacaggcccatattaccccttgactatttagccaagacataagctacaaattttgccggaaaaactgtccatacatttttaactacttcttcattattcttatggaccatcatccaggacatctgtttgaagaaatatccagttataatattttcaaaggttagaattgtgaagaaaaaatataaaatgtgattaaaggatatatagccttcagatgtaatttacagtttt

SEQ ID NO: 804 - DNA, 506 bp, Homo sapiens
cctttatcaagtaactggaaaacttttcttgcagccacaatctcaatgtcgttagtaggaagataagaggggagaaaaagctgtagaacaaatgtttggggttaccattgaaaatctaatgtctgcaatatttttctcctcacaacttggaaacgttcccagttcattttcagtcctgttgtgagcacagttctgaagggtttattattgtcaaaataagttttgttttgttttgtttatgttgggtttttaatgttgtctcttgacccttaatgctcaggttcttgtgggagttaatcagccacatccaatgttaccttgagggggaagaagagggtgatgctcagaagctaaacaagacaggggccacatgaccctctattgattagccccaagtagaaagtcctgtggttttatgtttaatggtaatagttgatcatatatggcataattttctatcagcttcctactcagtcactataaacacagacttgaaatagtacttt

SEQ ID NO: 805 - DNA, 270 bp, Homo sapiens
  misc_feature 26, 32, 47, 211, 235, 236: n = A,T,C or G
agaagactaaccatctctttactaanttctanctcaacttctattanctgggcggcctcaggatgcttttcacagtaatcaacaataaatttgtaatgttccaatgatgttgccaaattttccagctctttcttgggatctgcagtaatgattttgccatagagacgggcaactcgaaacttagctaacatggcagggcgaagaacatctncccctatatgctcagggaatactnnatttgggtctctcagggagtctaagaagagctgg

SEQ ID NO: 806 - DNA, 574 bp, Homo sapiens
  misc_feature 97: n = A,T,C or G
ccacggggactgttattcgcaagctggttttctagacctgttagctggaagcatggtgagcaccatttctggacgctcaggccgtgtcgggcttcantcatctccaccacataggtacagcagcgctttctggtagtcgcccttagtgtcttgctggatataatagtacagggacttgccgtactttctcttgaattcagacctaattttcaacatgtccacttcactgcgggagaccatgattctgatcaggaccttatctcgcgtccccttgcccttcatggagtcatacagccgatcagcaaaatacaggggcttgttctgaatgcactgaaccaggttcaggaaagcattttccaggtctcctttaacctctttcctgatgctttccaacatgtcataagggctgtaactcttgtacctatcaaatactttctggaggtggggcacgctccgctcggtcatgatgctgatccacttgggaacatcagttcctttcctcttcactccagcgtcatagagatcccgagcatcttggtcaatcagttcataatcaatgacagagccatcctct

SEQ ID NO: 807 - DNA, 467 bp, Homo sapiens
  misc_feature 199, 210: n = A,T,C or G
ccttgggagagagaggaaaagcaggtagatggttcgagaaccaaatgtggtctccagactctttcccagagtcagcaaaagccctggggtgacccccaggactctaggagccactccttttccctccagcccaaccaagaggtgaaaagaaattccttgggacacagcatcccaagccactcttaaatctccacatcgntttccttgtcnttgtcatggtctccatcatagaactcattgggtgcctctggcctgctatagttctcctcaggacccctctcctctgcatcagcctcatcagtcctgtcataggtcaggaggtctgcaggcacgtcatgaatctggacactaggtgcatggttcagcatcttcaggttttcaaagattgtctggcggatctggtccagatactggcgtgagttctgattctcgatgcgggtgctgacatctggatgaagtgtgaagtc

SEQ ID NO: 808 - DNA, 254 bp, Homo sapiens
  misc_feature 103, 175, 208: n = A,T,C or G
ctcattcttcttacaagcagtgatgttcggatcccacaggcttccggccttgacacacttttttttatatttcattatgtggtctaggcagcctggtgaggtnaaattcacagacatggaagggccatcttcattcatatttgcattaggaatattatgggccccaatgaaatanactgtgttcagctctacagggaagccgatgtangaaaatgtccatttaccaccagagggtctggtctgagtctggaagg

SEQ ID NO: 809 - DNA, 157 bp, Homo sapiens
  misc_feature 121: n = A,T,C or G
ttgccagccgcttcctcctcttattcccaagattagcgggatgaaaacgtcttccccgtgattgttttcatttcttttttctcggcatctgggcgtgcgcggttcagcaccttgaggaagncagacgttttcgcccgcatacgtgtgtgaatatagg

SEQ ID NO: 810 - DNA, 431 bp, Homo sapiens
aaatgaactagttaaacatggtctgcgtgccttaagagagacgcttcctgcagaacaggacctgactacaaagaatgtttccattggaattgttggtaaagacttggagtttacaatctatgatgatgatgatgtgtctccattcctggaaggtcttgaagaaagaccacagagaaaggcacagcctgctcaacctgctgatgaacctgcagaaaaggctgatgaaccaatggaacattaagtgataagccagtctatatatgtattatcaaatatgtaagaatacaggcaccacatactgatgacaataatctatactttgaaccaaaagttgcagagtggtggaatgctatgttttaggaatcagtccagatgtgagttttttccaagcaacctcactgaaacctatataatggaatacatttttcttt

SEQ ID NO: 811 - DNA, 109 bp, Homo sapiens
cgtcacccttggacaagacaaaccaagtcggaacagcagataacaatgcagcaaggccctgctgcccaatctccatctgtcaacaggggcgtgaggtcccaggaagtgg

SEQ ID NO: 812 - DNA, 216 bp, Homo sapiens
ctgcagcccatcctcccggctccctcctagtctgtcctgcgtcctctgtccccgggtttcagagacaacttcccaaagcacaaagcagtttttccccctaggggtgggaggaagcaaaagactctgtacctattttgtatgtgtataataatttgagatgtttttaattattttgattgctggaataaagcatgtggaaatgacgcaaaaaaaaaa

SEQ ID NO: 813 - DNA, 329 bp, Homo sapiens
cctgcaggggatggaaccttccagaagtgggcggctgtggtggtgccttctggagaggagcagagatacacctgccatgtgcagcatgagggtctgcccaagcccctcaccctgagatgggagctgtcttcccagcccaccatccccatcgtgggcatcattgctggcctggttctccttggagctgtgatcactggagctgtggtcgctgccgtgatgtggaggaggaagagctcagatagaaaaggagggagttacactcaggctgcaagcagtgacagtgcccagggctctgatgtgtctctcacagcttgtaaagtgtgagacag

SEQ ID NO: 814 - DNA, 236 bp, Homo sapiens
cgccgccacaatgggccgcgagtttgggaatctgacgcggatgcggcatgtgatcagctacagcttgtcaccgttcgagcagcgcgcctatccgcacgtcttcactaaaggaatccccaatgttctgcgccgcattcgggagtctttctttcgcgtggtgccgcagtttgtagtgttttatcttatctacacatgggggactgaagagttcgagagatccaagaggaagaatccag

SEQ ID NO: 815 - DNA, 437 bp, Homo sapiens
  misc_feature 366, 418: n = A,T,C or G
taaatgctgttaatttaacaagtagattcttctccaaagaatgatgagtgattcttgggaagataaatgttaatgttcccaatagtcaagcttgttttgcagtagtgaaaagcttagatgagtacggatacctcatttgaaactcagcctagtaaggaagtgaaaacttagcagtcagtgacatggggaaatagttatagaaaatgtcactgaattttttcatatttataattagtcatttacatatttttgtcttgttgatcattacctgtaaatgaaagaccttaataggaaaaaaagagtaaagctcagtgtgaatgcaaacatccacaaaatatgatcttcgtttatattctgtgatgttgnttataaatgaatgcctcagttctctgctacccttttcacagctttgtactgnttgccttatattctatttg

SEQ ID NO: 816 - DNA, 277 bp, Homo sapiens
cagctctttgtccgcgcccaggagctacacaccttcgaggtgaccggccaggaaacggtcgcccagatcaaggctcatgtagcctcactggagggcattgccccggaagatcaagtcgtgctcctggcaggcgcgcccctggaggatgaggccactctgggccagtgcggggtggaggccctgactaccctggaagtagcaggccgcatgcttggaggtaaagtccatggttccctggcccgtgctggaaaagtgagaggtcagactcctaaggtgg

SEQ ID NO: 817 - DNA, 341 bp, Homo sapiens
gttaattttaacaactgaagtcttattgttgaaacttattttcaacaaaactgtgcagttaaatttgtatacgtattcacatactgaaagatgaaccgttaaaatagcacttaattttgtgtttcttcaatatgtcttgatatactttgtgcaattaatattacacatgtaagttgtatggcagtttacagaactcaatgacttgtcatgaggttttcatatgagctacacattgtgtacattgattgttttttatttttacataaatccattctgtcattttcaactttatatataaatctccaatgttatgggaaacaatagattgacacataattttt

SEQ ID NO: 818 - DNA, 613 bp, Homo sapiens
  misc_feature 597, 601: n = A,T,C or G
ctgaagcgtgcggccctgggacggatgtgcacagtgattaagaggcagaagcagagtttggagtatttggagcaagtgcgtcagcatttatcccgtttgccaaccattgatccgaataccaggaccctgcttttgtgtgggtacccaaatgttgggaagtcctgcttcatcaacaaggtgacgagagcagacgtggatgtccagccctatgcgttcacaaccaagtctctgtttgttgggcacatggattataagtatctacgttggcaggttgtagacactcctgggatcctggaccaccctctggaggataggaacaccatcgagatgcaggccatcactgccctggcccacctccgtgctgcagtcctgtatgtgatggatttgtctgagcagtgtgggcatgggctgagggagcagctagaactcttccagaacatcagacctctcttcatcaacaagcctctcatagttgtagccaacaaatgtgatgtgaagagaatagctgaactttctgaagatgatcagaaaatatttacagatttgcagtctgaaggattccctgtaatagagaccagcaccctgactgaggaaggngttnttaaagttaaaa

SEQ ID NO: 819 - DNA, 462 bp, Homo sapiens
cgccagattccctccgtcgccgccaagatgatgtgcggggcgccctccgccacgcagccggccaccgccgagacccagcacatcgccgaccaggtgaggccccagcttgaagagaaagaaaacaagaagttccctgtgtttaaggccgtgtcattcaagagccaggtggtcgcggggacaaactacttcatcaaggtgcacgtcggcgacgaggacttcgtacacctgcgagtgttccaatctctccctcatgaaaacaagcccttgaccttatctaactaccagaccaacaaagccaagcatgatgagctgacctatttctgatcctgactttggacaaggcccttcagccagaagactgacaaagtcatcctccgtctaccagagcgtgcacttgtgatcctaaaataagcttcatctccgggctgtgccccttggggtggaaggggcaggattctgcag

SEQ ID NO: 820 - DNA, 439 bp, Homo sapiens
ccactccgagaccatccggatcccgacctacaccagagcaaatgtctaatggtgagaagccgcttcaccaccctacagatccgcggtgcagagatttccctgctaaggtcctaactcctgaatgggtacggcgagtacacccgaagaatcgaaagtttctccattagattagcttcattttcgaatgctccgttttgcatgcttaattttgaaactagcccgtggtttggcagaatttgactgaattcaggggtgagagtttgatccagtccaagtgtatttgaatttgagcacgcagttcaaccagtgtttacaatggaatttctgaagacttgtgtacttagaagaaatgcatgcactgcggtttgcttctggaggaagcaaagttgtccaaaagccttcagttagaaggattagtactacctctccaaggagcact

SEQ ID NO: 821 - DNA, 461 bp, Homo sapiens
aaaaggaaaagaataagtattcttgcatctggccttagaaatgtgaagttatattctcaagtttatttttttccaagtgtagctaaaatatttttgcaggtaaaataaagctgatagtacatgtgttgttcaaaccttgttaaacctaatattgaactatttttatatctgctgtctttcagaaggcaaataggaaactatatatttgcttaaaaattggcatttagtaaccttaattctttttatagaaggaatgacttaaagtattgtcccctctttttgcactaattgtggatttttttagatgcttctcaaaattttcagtgtgtaagctaaacaaaaactaaaactaagaattctcaaaaaaacttgttcaaaacagggaaagactgatgaaaagtaaaatggactacttttgtaacttacctgtttgttaggaaatggaatggtctctttgattt

SEQ ID NO: 822 - DNA, 511 bp, Homo sapiens
aaacaaacttccagagaaaactggtctctatatatttaagtaacaaatttgacaaaatacatatttatacatatatagatctctaatataaatattaaatttgaaaaaatcaaatgtgaagcagaaactgctatacaagtatattgtataatatttattttatacattaaagtatttggttgaatatacttcaattaggtttctaaaaaacaccattatctgcttcttagtaattgcgacattcttgaaaagcatgtgaaacgggtataaacttcaactctgcgcttaattcagaattcctgtttgttctcctcaaacttttatcttcctaaagcatcttgccagagactacaaaggaaaggaacatttacagagcactataaacatgtctttggacagtaaaacagtatttattcttctacactcttgattttccaatcatatcttcctcaaggcaatgtttctttggcccaatttgtgcaactaaacataaaatttcaaaacacaactt

SEQ ID NO: 823 - DNA, 191 bp, Homo sapiens
  misc_feature 21, 23, 25, 43, 72, 109, 131, 172: n = A,T,C or G
actggattttgcaaaaggatntntnatatttctgtctgctcanaatattaatttgtaaattctgcaagtttnatttttatgtagatggtataacatttgaaaatattgncttatgtgattttttcccctgnaaatatttgcttgtaaatgaaaacttaactagggcttaaanaaacatgttgctatgaaat

SEQ ID NO: 824 - DNA, 613 bp, Homo sapiens
  misc_feature 535, 569, 578: n = A,T,C or G
aaaaatgaataattatttctgaaattagcaagtcgacatccttttctaaattatgggaatatttaatggtaaaattaaatttattaatctttataaaatccttcctctgatttaagtaataagtaaccaccactgatactgaaagttatctagtgataagaaattgcacatttagtcaaaaaataaatcattaacctgattatacaatgataatgaaaacaaattatttgtctccagaaaccatttgttgaagctgattttggataatgaaaatgtatttctgaatctatatattacagttataagtaatattactaacactatctatgttttttctaagatgtaaacattattttaatatgtctctattcataagatacatttccatctaagcgtgaaacagaatactggaaaggttaaatactcttaaaatatttcagtctaacacccaaaagcatagtgttttgccagtgcaggggaggtatccacaaaatatcaggcacatatctgagaggggcagtctggtctacactgntactcttcatagggtttaacaacatatacaccgngtttatggnaacactgccccactgatacaagaaggaatgctcta

SEQ ID NO: 825 - DNA, 487 bp, Homo sapiens
ccattttggagtgtgtccattgggtagcaatgtggaaaccaccagggcctttgtggagaaaatggagggggttgagggagtcccaggaggggcttatttgagggcctttgccacttgctcataggcgagctcgatctcctcatcatctggacaggtggaagcgaattcttcccgggcgtaggcattgctcaagtaccgatgcactccccggaaggcctagaacatgcactggggagtgcggtggaggaagaagaggaagggagcaggtgagtgaaggaaagccccggcttcccgcccctagagactgcaactggaccctgcactgtgcctccaggacaaggctacctatctacctcctctacgaccatgtgacttttacagcttgcctctggagcaccatttcctttgtgcagcaaaatataaagagttcttaaacaaaggcactctaaccaactgcaggcgtttcgttctttttttttttttcttc

SEQ ID NO: 826 - DNA, 244 bp, Homo sapiens
  misc_feature 212, 223, 228: n = A,T,C or G
cgcgagatggtctagagtcagcttacatccctgagcaggaaagtttacccatgaagattggtgggattttttgtttgtttgttttgttttgtttgttgtttgttgtttgtttttttgccactaattttagtattcattctgcattgctagataaaagctgaagttactttatgtttgtcttttaatgcttcattcaatattgacatttgtanttgagcggggngtttngtttgctttggtttat

SEQ ID NO: 827 - DNA, 556 bp, Homo sapiens
  misc_feature 198, 505: n = A,T,C or G
atttctcagggcaaaggaacctggctcatttgaagattaatgttccatgcctttgtggtcaaacggtcagcacttaacacaggaaaaaactaggtgttgttttgttttgttattttggacaacataaaattcaggaatgttttatttagccttggtttctagaaggaagggaaataatatttcttgagcatttactanggtgttgcgtgctgtgctaagtaaattttaagtctttcagttttatagatacggaaaacaagggtgactctttaccacaggatgaataaagaactaagtaatatgggaatgcagcaatttctggactagctgagccgattccttcctgtgagcacactgtaagctttcaagttctctgggcaggaattacagcacctgtcccctgcaatggccctgctgtgtgatgctcatcgcttcccttcgtgctggagcagtcccccaggtgtccatctcctatctttttgttccaatcttctgtgagttccanctagcaggctttacatctggggaaaggaaaaccaggggttttagctctgtt

SEQ ID NO: 828 - DNA, 484 bp, Homo sapiens
  misc_feature 432: n = A,T,C or G
ccaagaccccaggcagaggcagaacttctgcagccagaacccggcttggatgcccactttgtagcttctccttctccattctcagtcagaccccctgggatgaaggggagggcaggggtggaggcaccttgaggccaagccagcaggtgggggtgctgcttgctcactcttgcatccctagctaggtcagcaccagctcctctgggccccaggacagtctgtggagcctgctcctcacctgccctgggagcctagggtaccaagggtaccgaggaagccatgggtagtggggacaccatgggtactgagggtactgagggtcctgagggcttgagggtggggtcctcagggatgtagacagtgctgttcccttcaggcatctcccagtagaccgcatcctcaaagcagttctcatctgaaggttgtccccanaatggtaatctcaaaatgagccccacaatgatgccacccatcagggccatgg

SEQ ID NO: 829 - DNA, 614 bp, Homo sapiens
  misc_feature 588, 590, 601: n = A,T,C or G
ttcgactgctagagccgagcgaagcgatgcctaaatcaaaggaacttgtttcttcaagctcttctggcagtgattctgacagtgaggttgacaaaaagttaaagaggaaaaagcaagttgctccagaaaaacctgtaaagaaacaaaagacaggtgagacttcgagagccctgtcatcttctaaacagagcagcagcagcagagatgataacatgtttcagattgggaaaatgaggtacgttagtgttcgcgattttaaaaaagtgttccctatttatttaggaaaaagtgaagcaagcaactgaatttatatgtaaaaataacatttagacctgtggatcaaagattattttcaaaaatgagatatcaatttggtatcagtaaaaagtgtcttttctcttagtatataaataaataaaatgcaaattaagagtgtaagcagttgtgaatcattacaagcagtctgggataactaactcctagggataaccatttctatcctgttccaaagtcttattttatagtttgaaaagcactttgcacacagttcttgtatataaaagtaaagatgtaattataggatatagngntcctgctttgnttaataagaacct

SEQ ID NO: 830 - DNA, 253 bp, Homo sapiens
  misc_feature 140, 178, 185, 203, 225: n = A,T,C or G
gctgactgtcctctcccctccagccttcggccttggcttttctagcctatttacctgcaggctgagccactctcttccctttccccagcatcactccccaaggaagagccaatgttttccacccataatcctttctgccnacccctagttccctctgctcagccaagcttgttatcanctttcanggccatggttcacattanaataaaaggtagtaattagacnaaaaaaaaaaaaaaaaaaaaaaagcttg

SEQ ID NO: 831 - DNA, 547 bp, Homo sapiens
  misc_feature 245: n = A,T,C or G
ctgatttttatttttcttcttgattctcttctacagtttccaaattctctacaatgaacatgtacttctttttaatatcaaaagacaaaagaattggtacgtaaaaagaacatccttcccatcttcaaggtcaagattgaacgctgactcctgcaggaagtcttccaggattcccaggcaggaatgatggctccctgtccctgtagctccaggagttcttgcttcacgcacgcctcacataccanactgaatgttggcaggaggagtgaccaggtcggtcatctgtgtccctaccacctacaacaggccagcaatctacccgtgtgtgtttgttggacagaattaaccatgatgggcggccgagggcgcctggagctatttgggggcttggagagaacctcttaggagagtgtcaggccctaggccagtgtcaccagaggaggtcagtctcagtccttggagtggtgggatggaaaccagacgggactggcatggtccacagttcttgccacaagggggcttcaggagaggctgagggcccctctga

SEQ ID NO: 832 - DNA, 554 bp, Homo sapiens
  misc_feature 510: n = A,T,C or G
aaatcaaagaagatagaaatgtacctttaatctacggcactgcaccagagcagaacataagctattccttcccccatgacagaggcatgaagctggggaggacacaggcattcaccttgacacagaatgggtcctgggatgtctacttctgggatgaactggaacatgaagagttaagtgcccacatgttctctcaccaacctcactccctgccacattccaaagggatagggctcagtgacaagacagcccagtacccaaaatgaagagggagggttctcgaattaattaactggaaatgagtcttgtcaatgttttggaaaggcagaggggtgaaaagagattgctagaattaatcacagtgagaaactacttcaaccgcctgccagagttcagaaaacccaatgagaagaggaatataaagaatgatgctgacttgccatctgaagggacaaacacagtcaagccaacatccaagttttgtcaaataagggttgtgccctccaaganactggtttattatctgctgtcacagtaagtacaatatattcttt

SEQ ID NO: 833 - DNA, 226 bp, Homo sapiens
aaaaaaaaaaaattccagaatgggtaagagaacaatcatcaaggatgtaggtgccagacacagggcagaaggtagctagaaaagtatgccttagggaagttaaaggtctagcctcattcctaccttgttttaatagctgtacctaatataaatagctaagtttcccattgttctagattcctctgccccatctacaaacatggcacagccagcttgacttgcaagg

SEQ ID NO: 834 - DNA, 397 bp, Homo sapiens
aaacctgcaaacaatataaagaggtaaggacttctgacgccaaaccatgcaagtaataacaaaggaacagagaaaaatattaataacaaaaagaaaatcattaaaaataaaaaaacaaagtacttcacatttcacagcagtgctttggcagtactggcaagcatttctggtcaactgcttccaacagcaggaatatgaagaaacccccagatcttagcaaaagtgtaacaacattttctccctgacagcttacattccaagtcattccataccataccgctccactccacagttttataaacctgatcttaagatgtaactaggtactatgtgtgctcacaataaaaactaactaaaaacaaatcagagggtagcagacaagtaaacaaagtttcca

SEQ ID NO: 835 - DNA, 608 bp, Homo sapiens
  misc_feature 317: n = A,T,C or G
ccaattgatttgatggtaagggagggatcgttgacctcgtctgttatgtaaaggatgcgtagggatgggagggcgatgaggactaggatgatggcgggcaggatagttcagacggtttctatttcctgagcgtctgagatgttagtattagttagttttgttgtgagtgttaggaaaagggcatacaggactaggaagcagataaggaaaatgattatgagggcgtgatcatgaaaggtgataagctcttctatgataggggaagtagcgtcttgtagacctgcccgggcggccgcccgggcaggtaaaaattattntattatctctgggtgacattttcatttatagtggcatttatatatacacatacatataggaggtgaatgtgagatatattccttagggcttttgataaaacccatatctttatccctagttcatttacaagagagcagcgtaatggtaactttgagattttccttttgacagtaatttccattatcatttgaatgggagaaattcttaggacatgatttggaatcatttctagaatataaatttcatataatcttattttataatgagacaaaactgtgtctttgtaacaa

SEQ ID NO: 836 - DNA, 480 bp, Homo sapiens
  misc_feature 37, 147, 155, 178, 266, 271, 357: n = A,T,C or G
tacaagctttttttttttttttttttttttttgccanaatatgcctattttattaacatcatgctttaataaataactggctacttctaataaaattaagcctctgtttacaacagcccccaatattccattttgaccactctgcanaatttggngtaaaaagttgaatgaaatgtanaccctgagctatcaagtaattatgtttcaatataaaaatagagaattactcttacaactgaagattgaacaataacacaaacaacctntttgngggttttaggttcggtaaaattagttgggatcttaatggctgtctaaagcaggaagggacagaattttagtctttctgaaaacttntgggaactcctttggaagtgatttgttacattatcagagttttatgagctatcatttggtaaggacacaaggaagggattcccaaggcagttgttagtctttggcctgggacaacagatatgg

SEQ ID NO: 837 - DNA, 610 bp, Homo sapiens
  misc_feature 435, 467, 517, 518, 542, 544, 545, 568, 594: n = A,T,C or G
gtaaaaagactaaaatgagggggaacagagttcactgtacaaatttgacaactgtcaccaaaattcataaaaaacaatagtactgtgcctctttcttctcaaacaatggatgacacaaaactatgagagtgacaaaatggtgacaggtagctgggacctaggctatcttaccatgaaggttgttttgcttattgtatatttgtgtatgtagtgtaactattttgtacaatagaggactgtaactactatttaggttgtacagattgaaatttagttgtttcattggctgtctgaggaggtgtggacttttatatatagatctacataaaaactgctacatgacaaaaaccacacctaaagaaattttaagaatttggcacagttactcactttgtgtaatctgaaatctagctgctgaatacgctgaagtaaatncttgttcactgaagtctttcaattgagctggntgaatactttgaaaaatgctcagttctaactaatgaaatggatttcccannaggggtttctgcatatcacctgtntnntagttatatgcatatgtttctgngcatgttctctacacaattgtaaggngtcgctgtatttaact

SEQ ID NO: 838 - DNA, 415 bp, Homo sapiens
  misc_feature 255, 307, 329, 338, 341, 383: n = A,T,C or G
cctcatccagggcccagcggtccctgcagaagccagaaggtgcaggggccaggggtgggagcatcggagggagtcccagagccctggaccttgggcctagaccgcgtgataaaactgggttgagggatgctggaaccagttacgactgaagtcagtgtagacctgagctgggagggaacctgttagtctccccacctcttccctgaagagacaggcacccctcccagccgtggtcaacggagggagtggcacttntgccttgagtccccaggggaaaaaaaaaaaagatatttatgaaataaatggnaatttgtgtaaataagctttangggtcccanaanatgcaaattggtattaatttattcaaaggtgtacattgctgngtacatatatttagagattaactcatacattt

SEQ ID NO: 839 - DNA, 283 bp, Homo sapiens
ctgaatctgcaactccccctgaaaaccaaagcctttttcatgttagatgggatcctttccaaatactttgatctcatttatgtacataatcctgtgtttaagccttttgaaaagccagtgatgatctcaatgggcaatgaaaatgtactggaaattaagggaaatgatattgaccctgaagcagttaaaggtgaagtgttaaaagttggaaataagagctgtgagaatatacacttacattctgaagccgttttatgcacggtccccaatgacctgctgaaat

SEQ ID NO: 840 - DNA, 213 bp, Homo sapiens
  misc_feature 10, 43, 63, 69, 107, 109, 116, 118, 133, 140, 144, 154, 182,185: n = A,T,C or G
ggcggctatnaacctaacccccaaatctatgtcaagctcatcnaggagtgcaccgacctgcanaaaganggcgagttctccacctgcttcacagaactacagagagncntcctgangnagcgccccaccaagntcaagancctnatccgcctantcaagcactggtaccaaaattgtaaganaancttgggaagctgccacctcagtatgccc

SEQ ID NO: 841 - DNA, 163 bp, Homo sapiens
  misc_feature 135: n = A,T,C or G
agtgttgacacttaaaattaaacacatgcatacagaaaaaaaaaaaaaaaaaaaaaaaaaaaaaaaaaaaaaaaaaaaaaaaaaaaaaaaaaaaaaaaaaaaaaaaaaaaaaaaaaaaaaaaaaaaaaaaaaaanaaaaaaaaaaaaaaaaaaaaaaaaaaaa

SEQ ID NO: 842 - DNA, 466 bp, Homo sapiens
aaagtttattccagctataatgcaggttattctgactttaaggtagcatcacatggcatacttctgagtccattcccgagatattctgttgtacttatctctgtctgttttatagatccgtgcaatctctggcactagggggtcatctgggtttggatcacatagcagtgaacaaatggataaaagaactttagaaattgttaaagcaggcgaccactgtgatcttagaatatcgagacaaatgctgccattactgttaatatttggatgataaattcttgttgtaaatgcaaccttaggtggtttgaaggggtagtctgtaggaaaatgaattgtcaaaaagaatacaccgccttgatatgggctgtcattaggtcccataattgtggcttgccaatgaaacatatcatccccaactggacctacagaacattgtgctggagggtcacgggccaaatcactaagt

SEQ ID NO: 843 - DNA, 203 bp, Homo sapiens
caactaaatgattttcataaacaccaaaaagtagttaaaacttttgtatacataaccaaaaaaaaaaaagaaaactgtacatttacagtatttgctgctgttcattccccaaaatacaattaggacataattggctattaaaaatttataaaatttaataaaaaactttgctatgaatgtagtgttacccacttttgcattaa

SEQ ID NO: 844 - DNA, 416 bp, Homo sapiens
cctccctgtctaaaatccctccttcatcccccgctggtggcagaatctgttaccagaggacaaagcctttggctcttctaatcagagcgcaagctgggagcacaggcactgcaggagagaatgcccagtgaccagtcactgaccctgtgcagaacctcctggaagcgagctttgctgggagagggggtagctagcctgagagggaaccctctaagggacctcaaaggtgattgtgccaggctctgcgcctgccccacaccctcccttaccctcctccagaccattcaggacacagggaaatcagggttacaaatcttcttgatccacttctctcaggatcccctctcttcctacccttcctcaccacttccctcagtcccaactccttttccctatttccttctcctcctgtcttt

SEQ ID NO: 845 - DNA, 451 bp, Homo sapiens
  misc_feature 15, 57, 190, 230, 247, 291, 310, 349, 419, 424, 443: n = A,T,C or G
gattgattgtatgcnaatagccctttatttacatgccactattaagctgctaattgntcctgttggggtgacagatactgaatgtatacgtattgtgcctgagctcaccagcaaacagaagcatcaagcccaggggtaaaggctgaagctttcacagtgcagagactgctagcctgggcacacacacctnctttctggccgtcttctgtgtagggcacactttaacccantctctgttgctgttgantctctgctccgttttgtacagtcacagggaattctgatctgaangggcaccttctgttcactnccacaaagtggtgtctggttctcactgagacgttttaanatttttccacaaatatttatatgtactaaatgtggaaccattagaaagttcttccaaaatctcattccancatanttttggatttttcttttgncttatttt

SEQ ID NO: 846 - DNA, 518 bp, Homo sapiens
  misc_feature 458, 489, 495: n = A,T,C or G
ctggaagcctgtcaaagagagagagcattttccgtgaagtttgaggtccaggctccacgctggggcaacccccgtgcgctcagcttcgtactgagttcgctccagctcggggagggggtggagttcgatgtgctgcctgcctttgatgccctgggtcagttgactggcggctataaacctaacccccaaatctatgtcaagctcatcgaggagtgcaccgacctgcagaaagagggcgagttctccacctgcttcacagaactacagagagacttcctgaagcagcgccccaccaagctcaagagcctcatccgcctagtcaagcactggtaccaaaattgtaagaagaagcttgggaagctgccacctcagtatgccctggagctcctgacggtctatgcttgggagcgagggagcatgaaaacacatttcaacacagcccaaggatttcggacggncttggaattagtcataaactaccagcaactntgcatntactgggacaaagtattatgact

SEQ ID NO: 847 - DNA, 481 bp, Homo sapiens
aaacaacaagacgcttgacttgaagggaaaactatctaggattcttttttgttttagagtaatttatccctacttaaagacagattgccctacatgtaacagctacgtacaaaaaagttataaaattgtccttggttttacaatgataaatgaaaaacattaaaattctccaattgaacaaggtatgcaaggatttttatgttgttgttttttttttttgttaaaacagtgagagcaaaataacttactggaatataaagataagagctgaatgagcatgccactaatggagaaagggggtattttcacagaatcagtatttttccccatcccgtctccacttgatgtcaatcaaaacataccattggctgtttagttaaaaaaaaaaaatgcaatatgcttgtgcacatataccagttactttatgtacaataaaggaatggggaagggggaaatgaaagaatagagaaaactatacggt

SEQ ID NO: 848 - DNA, 543 bp, Homo sapiens
  misc_feature 504: n = A,T,C or G
aacattgtcgtaaagaacttttctggaactggtgactgatttaagacattggaagatcatgataagctgcatatcttccagtcacatgatggtaaatctgtgaggaaaagcagagtttaattaacaatcattctataattatacacatcagttaataattatactatcaaataataataaatagttttaatgaacatttcattagaaagcctcactagtatgtgcttcagcagaatctccaccctactcacttctgatggcggtttgcttggaagaaaaggtagaggattgggtaggatgaggtcaatcagatgagtttttatctccagttctcaatttgacttttcaattcctttctcaaaaaacacttgttaatttattccaaagacagagatgattactcacctgcctctcaatgtccgagagcagagtactggcacctattcgaaagagttctggcttcagccactcatctccaagctcctcctttacaagagagagccnagcaagggaatcctttgcactgcggatgcctcctgctgg

SEQ ID NO: 849 - DNA, 271 bp, Homo sapiens
ctttgcagttgtccgaacagacagcctgaaggggcggcggggccggctaccttcaaaacccaagcagcccccagatgcctcccctgccaatctcctcacttccctggtccgtgcacacctggactcagggcccagcactgccaaactggactactccaaggtgaggtcccaccccgtgtctgccttggggaggtctatgagcacatgcagtgcctttgtgcgtgttaggagagctaccccctctggaaggactgaatgagaaaggaggttt

SEQ ID NO: 850 - DNA, 272 bp, Homo sapiens
caaagaactactgacaacgaaggccgcgcctgcctttcccatctgtctatctatctggctggcagggaaggaaagaacttgcatgttggtgaaggaagaagtggggtggaagaagtggggtgggacgacagtgaaatctagagtaaaaccaagctggcccaaggtgtcctgcaggctgtaatgcagtttaatcagagtgccatttttttttttgttcaaatgattttaattattggaatgcacaatttttttaatatgcaaataaaaagttt

SEQ ID NO: 851 - DNA, 167 bp, Homo sapiens
aaaaatatctgcaagcaatttgccatatcaataaagaaatgtctacagattcaagtctgaaagagaagaaggtaagtgatcagtaacccttacagacatggaaaccaaggaagcctcattcctgtgctgagaatattctagtagctcctgctgctgccacatggcag

SEQ ID NO: 852 - DNA, 482 bp, Homo sapiens
  misc_feature 383: n = A,T,C or G
tcccaagtggatcagcatcatgaccgagcggagcgtgccccacctccagaaagtatttgataggtacaagagttacagcccttatgacatgttggaaagcatcgggaaagaggttaaaggagacctggaaaatgctttcctgaacctggttcagtgcattcagaacaagcccctgtattttgctgatcggctgtatgactccatgaagggcaaggggacgcgagataaggtcctgatcagaatcatggtctcccgcagtgaagtggacatgttgaaaattaggtctgaattcaagagaaagtacggcaagtccctgtactattatatccagcaagacactaagggcgactaccagaaagcgctgctgtacctgtgtggtgganatgactgaagcccgacacggcctgagcgtccagaaatggtgctcaccatgcttccagctaacaggtctagaaaaccagcttgcgaataacagtccccgt

SEQ ID NO: 853 - DNA, 287 bp, Homo sapiens
gtgaagtagtgcggcttcttcacattgatgccatactcgctgagggcaggggtcaagtcctccatggttagagtgtacttgcggtccttgctcttgctccgggagctgccggaggccgtgcccttcattttgcagtgctgtagggcatcattggcaatatctgagatgaatttctgggcagctaaggagatgagccgaattatgcgtgggtctgaggcctcaaagccagcacggttcaggtagtaaccagtcactgcatctgggatcgtaggcgtgtaatcttccag

SEQ ID NO: 854 - DNA, 484 bp, Homo sapiens
ccatggccctgatgggtggcatcattgtggggctcattttgagattaccattctggggacaaccttcagatgagaactgctttgaggatgcggtctactgggagatgcctgaagggaacagcactgtctacatccctgaggaccccaccttcaagccctcaggaccctcagtaccctcagtacccatggtgtccccactacccatggcttcctcggtacccttggtaccctaggctcccagggcaggtgaggagcaggctccacagactgtcctggggcccagaggagctggtgctgacctagctagggatgcaagagtgagcaagcagcacccccacctgctggcttggcctcaaggtgcctccacccctgccctccccttcatcccagggggtctgactgagaatggagaaggagaagctacaaagtgggcatccaagccgggttctggctgcagaagttctgcctctgcctggggtcttgg

SEQ ID NO: 855 - DNA, 302 bp, Homo sapiens
  misc_feature 81: n = A,T,C or G
aaaaaataaaaaacaagacaacaatttagtagaagtaccactgggagggaggggaggggaaaaaaggatatacaggggcangtgtattctctgtacagaggtgcagagaaaatttcacatagctttagagaatgccttgtggaaaaaaaaaataggccccaatacttgttactgccctttatcaaaactgtgtgcatgacctgcacaaataaaatcacaaaacagtgttgccacattcttcaaggaaacaaagcaaaatttagtgggtttcttttccctctccttgttaaaagtcatttttt

SEQ ID NO: 856 - DNA, 446 bp, Homo sapiens
  misc_feature 306, 325, 418, 422, 429: n = A,T,C or G
ccatggatgtgccccaatacagtacacattttttggttaaatttgttttcagatcatttcatggaatctttgaagtatctttgactctaactttgacttggtggtggaccttccttggtttttataacacctaagagatatcctttagaattacatgtattttagcataaggaaattgaaaaagtaaaacatactggtttttttcaacaagaccatatgtaaattaaatagtgaaatgtgtatgagtttcagtagaactgtaccatcaacaatgtttccataaatatgcagagttctttcttttgnattgtatttacaatattgntaaattgaatgcatttgcaatttctaggattctaaagaattgagtacagaaagtagcaattttattatttgatgataatatgagaattactgngccnatactgntttgataaataaataga

SEQ ID NO: 857 - DNA, 391 bp, Homo sapiens
aaacgtttgcccctggcgtttcctaagtacgaaaaggtttttaagtcttcgaacagtctcctttcatgactttaacaggattctgccccctgaggtgtaatttttttgttctatttttttccacgtactccacagccaacatcacgaggtgtaatttttaatttgatcagaactgttaccaaaaaacaactgtcagttttattgagatgggaaaaatgtaaacctatttttattacttaagactttatgggagagattagacactggaggtttttaacagaacgtgtatttattaatgttcaaaacactggaattacaaatgagaagagtctacaataaattaagatttttgaatttgtaaaaaaaaaaaaaaaaaaaaaaaagcttgtac

SEQ ID NO: 858 - DNA, 191 bp, Homo sapiens
  misc_feature 10, 132: n = A,T,C or G
tacctccgangtgagtccagatcactaggagcagcagtctgtcggtgggatgcgatggatggcgatggctgtggcagcgcaggtctgtgggcagaatgatgtagtcgtctggcagtctggtggggaggaganggcttggcagcggcggcagtgggtggtctgtccagtgtgtaacaggagcccagcttgca

SEQ ID NO: 859 - DNA, 95 bp, Homo sapiens
aaaaaacaaaaaccacaaaaattcccaaaccatacttgctaaaaattctggtaagtatgtgcttttctgtgggggtgggatttggaaggggggtt

SEQ ID NO: 860 - DNA, 592 bp, Homo sapiens
cccggagcacggagatctcgccggctttacgttcacctcggtgtctgcagcaccctccgcttcctctcctaggcgacgagacccagtggctagaagttcaccatgtctattctcaagatccatgccagggagatctttgactctcgcgggaatcccactgttgaggttgatctcttcacctcaaaaggtctcttcagagctgctgtgcccagtggtgcttcaactggtatctatgaggccctagagctccgggacaatgataagactcgctatatggggaagggtgtctcaaaggctgttgagcacatcaataaaactattgcgcctgccctggttagcaagaaactgaacgtcacagaacaagagaagattgacaaactgatgatcgagatggatggaacagaaaataaatctaagtttggtgcgaacgccattctgggggtgtcccttgccgtctgcaaagctggtgccgttgagaagggggtccccctgtaccgccacatcgctgacttggctggcaactctgaagtcatcctgccagtcccggcgttcaatgtcatcaatggcgggtctcatgctggcaacaagctgg

SEQ ID NO: 861 - DNA, 429 bp, Homo sapiens
aaaagaaatatcctgaggcaattaacaaagcaaacacaagcagctttctttccaacgcattaatacatagacactgctcaggttttttttcaccaagttatggctaagtatacaaatagccaatacttgcagttttcaacagtactagaaaacccaaaacctgccctatgaccctcacccttaccattagtaaaacgtaaatttgatcaatcataacctataaagtcatataacaaagggaaggctaaagactgatcattatcagtaaatccattcaattccagatgccactttaggctgatgtgtctagtaccctaatgattgaaaaatcattaatctagaaaaagcatttgcaaactaaggataacttcgcagttgatgtgcctttttttgctattaaaagtgctatttaacatgctaaaatgtctt

SEQ ID NO: 862 - DNA, 324 bp, Homo sapiens
atttttggatataagcggagaggtggtgttccgtctttgattgctggtctttttgttggatgtttggccggctatggagcttaccgtgtctccaatgacaaacgagatgtaaaagtgtcactgtttacagctttcttcctggctaccataatgggtgtgagatttaagaggtccaagaaaataatgcctgctggtttggttgcaggtttaagcctcatgatgatcctgagacttgtcttgttgctgctctgagcatctggaggaacagaaaactaagttcatgtcatcctgctgtaatgggcagagcatattttttttgtattt

SEQ ID NO: 863 - DNA, 319 bp, Homo sapiens
  misc_feature 31, 39: n = A,T,C or G
tggataaggcttgctatgatttgcactattngtacagtntagttagaaaggaaagctgaacactataaaactattaacatattttcgtatatgagtaacaactttgcttaagtgtttatcttagttcagaaatacataatgtcatatgttaaaaataaagagatgtagaaatctaaatgaattatcactgtgtatacagacagaaaaatcacataactctggtgtgttaacattgcaatgaaaaaatgaaaaaaaagaaggaaaaaagaataagaatgaaaactgctgacgtattacaaaacagaaaaataaatgattt

SEQ ID NO: 864 - DNA, 534 bp, Homo sapiens
  misc_feature 13: n = A,T,C or G
actgccagattcngaaagagaaaattcttggtctttgtcctcactaaaggcagtctctttctcaatgtaactatgctgctttaagcaaagtttggtattttttgcaacagtatttaaggcaggacaagattacacaggttgatactacctttcaaagagaatagactaggtgaatatttcatgtaaaatgtttgtgatagaggctgactctgatgggaaagtatgcccaggctgatgcccgttaatattttcccttcaaggtttcttgaaagagaaagcctttcaaagagtccgtagaggaatgcattattcctgtttcatatccagcactttgttcacgttctctgaagatatttctggcatctgaagcatgtaagactatgacactcgttaaaataagaccaggcgttaatcactaacacaattatcttcacctttggtcttggcttgggactaatctcctaattttgtcctattttataaagggtttccttgtgtcaactggaaggactgagaaaaaatagtgttcccaga

SEQ ID NO: 865 - DNA, 359 bp, Homo sapiens
ctggaattgggggcctcgagctggctgccatgattgtgtccatgtatctgtactgcaatctacaataagtccacttctgcctctgccactattgctgccacatgggaactgtgaagaggcaccctggcaagcagcagtgattgggggaggggacaggatctaacaatgtcacttgggccagaatggacctgccctttctgctccagacttggggctagatagggaccactccttttaggcgatgcctgactttccttccattggtgggtggatgggtggggggcattccagagcctctaaggtagccagttctgttgcccattcccccagtctattaaacccttgatatgccccctagg

SEQ ID NO: 866 - DNA, 470 bp, Homo sapiens
ctgacttcagggagcagattttaagagtaaaagaagatgagaatgttccatttctactggttggtaacaaatcagatttagaagataaaagacaggtttctgtagaagaggcaaaaaacagagctgagcagtggaatgttaactacgtggaaacatctgctaaaacacgagctaatgttgacaaggtattttttgatttaatgagagaaattcgagcgagaaagatggaagacagcaaagaaaagaatggaaaaaagaagaggaaaagtttagccaagagaatcagagaaagatgctgcattttataatcaaagcccaaactcctttcttatcttgaccatactaataaatataatttataagcattgccattgaaggcttaattgactgaaattactttaacattttggaaattgttgtatatcactaaaagcatgaattggaactgcaatgaaagtcaaatttacttt

SEQ ID NO: 867 - DNA, 603 bp, Homo sapiens
aaaatcaagatagagcattccttcttgtatcagtggggcagtgttaccataaacacggtgtatatgttgttaaaccctatgaagagtaacagtgtagaccagactgcctctctcagatatgtgcctgatattttgtggatacctcccctgcactggcaaaacactatgcttttgggtgttagactgaaatattttaagagtatttaacctttccagtattctgtttcacgcttagatggaaatgtatcttatgaatagagacatattaaaataatgtttacatcttagaaaaaacatagatagtgttagtaatattacttataactgtaatatatagattcagaaatacattttcattatccaaaatcagcttcaacaaatggtttctggagacaaataatttgttttcattatcattgtataatcaggttaatgatttattttttgactaaatgtgcaatttcttatcactagataactttcagtatcagtggtggttacttattacttaaatcagaggaaggattttataaagattaataaatttaattttaccattaaatattcccataatttagaaaaggatgtcgacttgctaatttc

SEQ ID NO: 868 - DNA, 314 bp, Homo sapiens
  misc_feature 141, 148, 159, 164, 172, 213, 244, 256, 265, 283, 301, 303: n = A,T,C or G
aaaatgaagacaagaataatttttataaaatgaattagacacatatcaaccctagggggaatcttcaaggtggtctgctcctttgaaaagctttgtacaagcttttttttttttttttttttttttttttttttttttttnggaaaanaaatctgtttnttttnttaatganctcaaagtaaggtttggagtgacaatcctggcagcaattanagcaaagggcaaaggaaagggatggaaaaanaaaaactccagnggggtcttnttagggttcaaggaaggngtcccccaaagctgggananaccaaattcac

SEQ ID NO: 869 - DNA, 476 bp, Homo sapiens
aaattgttattgggaatatatagatttgatgtgttattttgggatgtgtaatattaatgtcacaatcactacaggtcagatatttaggtgtgcttcggtccacaagtcttttgtcatattgtgctcgcttacctaaactgtaattgcctgataaaagataatatgacagtgctgaggtgacattcaaaatgagacgggatgcaataaatgattgccttcagtatttacacagaaaaaccacttgctctttcttggttatatttcatagggctagattgtttccatcgggcactattcttaattcactctataccgtgttgtcacatgctgcctctgggcagagaatcccacttaaaataagctttaggggatcttctagaaaagggtagtgtgctccaatttttatttctccttcttatgggggatgaggatcaattatagtacaagaccatttggaaaatatgcatatatatttt

SEQ ID NO: 870 - DNA, 353 bp, Homo sapiens
cctgtcttgtaaacatagttcacagataattctggcaaactaagatgtgcaggtcaattgggattaagattttaggtgggagcctaaaaaaataaataaataaataggattttaggtgggagcaaagtgaggaaatcagattcacaagagaaattgatgtgaaagatattgctaaaaataatttgtattcaatttccaaatttgctaaagtggtcatgtacccatatctttgatttatttcctcaaataatttttcatgctttttagtaatatgctgtcaatcttttttctaacagttctttcagaatggaaagtatacataataagatgagaggtgctgggaatgacatttt

SEQ ID NO: 871 - DNA, 470 bp, Homo sapiens
aaaaaatagtttcttcttttatgtggattctcttaagatttgaagaaccaaactactctttggttttattatacgggaaaaacaacacgcagcctagttaaacaactttgtgatatttatattccattgcacagatatgggttatacaaattagtaacacaagttatttcttaaattccaaacattttctaaaatattattacagcagatgcctaggatattaaaacataaaggtggaaatcattctctaaatagttaaatatatttgacactgaaaatactgcacattttaattagaggaaaattaaaatgtgtgctcaaatgcactaacaaactaggtagcagggcaactaacaactacaaataagtcactgtggtccatttttacgtatgcatatatatgattattctctagataatccgtcttcttgaaaatgctaataaaacataaaaatccagataaatgattt

SEQ ID NO: 872 - DNA, 530 bp, Homo sapiens
  misc_feature 455, 469: n = A,T,C or G
cataaagtcgtggggggcattttctggaatgctcagcagttctgattaactgccaagcccaggttgcctctcatgaggcaactgaaaaaatcctgtgtcttgatagcatgggtgctgtgtgtgtgcatgtgtgtgtctgcattcatgccttaactcgggttactgcacaactttagttcttgacttagtctgcaccgtcatctagattgtattgtacatctcggtctgaacttcatcctggcaaaaacaaagttgcaggcacaacagtttaagaatgcattcctccagaagagtatctggtcaggttgaccctgagccttctttggacttgatttggaacttagcctggaaagcgaaagtggactgtccaacagaaagatgtcaacaaggaaaagaggagagccaagcgctagcatgccttttgcctctgcatatctgtgcacactgtatgttgntcatgatagcttgnctacaacttgactaggttggagttctggtaatagtggcaatcttgacattcttggtcagag

SEQ ID NO: 873 - DNA, 556 bp, Homo sapiens
  misc_feature 327, 343, 510, 543: n = A,T,C or G
gttaagggcatttttatactcagaactgtcccatccccaggtccctaaacttatggacactgccttagcctcttggaaatcaggtagaccatattctaagttagactcttcccctccctcccacacttcccacccccaggcaaggctgacttctctgaatcagaaaagctattaaagtttgtgtgttgtgtccattttgcaaacccaactaagccaggaccccaatgcgacaagtagttcatgagtattcctagcaaatttctctctttcttcagttcagtagatttccttttttcttttcttttttttttttttttttttggctgngacctcttcaaaccgnggtacccccccttttctccccacgatgatatctatatatgtatctacagtacatatatctacacatacagaaagaagcagttctcacaatgttgctagttttttgcttctctttcccccaccctactccctccaattcccccttaaacttccaaagcttcgtcttgngtttgctgcaaagtgattcgggggctgacctanaccagtttgcatg

SEQ ID NO: 874 - DNA, 419 bp, Homo sapiens
aaactcaatgcaatacaaatcctttttattgtaaaagctgagttgaaactaaaagatctataaaaactgttacttttggccttaaacagtaccaactcttatgatcaaaaaaggccacaacagttaagattgtattacttgattttattttacactaggtggtgggcagacaaagtaatccttaataaagttgacaattagcttcactcaatatttttaataatgcacattaaaaaaagtattcatcttacaaattcttctgcaatccaaacatacaatagcttggagaacatttagaaaacaaaagccaatgtaaaaagacagattaaaacaactagaacagtacaggttttatttatatggctcgaattttacagttttcttactgcatcatcaatgtcagaaatctgttccttcag

SEQ ID NO: 875 - DNA, 386 bp, Homo sapiens
aaacagttccattgtcgtttctgaaaactacagtattctcagaagttgtagcagcagtaaaaaaaaaaagttgttctataagtgattggggcagatttaactgattttgttaaaccaatttgtaagttactgcttctaatattacacttctaaaaagctgaatttatactcatgtcctaaaggagaatatgtggtaataaagtatatttgttaagtaactaattgaaataggcttggttttaagagttccagtatataataatcacaaattgaaacctgacagtatcttgggagttccagtaatgtcacaaattagtgaataagcatgccagtgtgcaagggtaatgtaaggattgttagcctatctaaatattcaaaattacttt

SEQ ID NO: 876 - DNA, 500 bp, Homo sapiens
  misc_feature 485: n = A,T,C or G
ctcgtcaccttcgtgaataccaagacctgctcaatgttaagatggcccttgacattgagattgccacctacaggaagctgctggaaggcgaggagagcaggatttctctgcctcttccaaacttttcctccctgaacctgagggaaactaatctggattcactccctctggttgatacccactcaaaaaggacacttctgattaagacggttgaaactagagatggacaggttatcaacgaaacttctcagcatcacgatgaccttgaataaaaattgcacacactcagtgcagcaatatattaccagcaagaataaaaaagaaatccatatcttaaagaaacagctttcaagtgcctttctgcagtttttcaggagcgcaagatagatttggaataggaataagctctagttcttaacaaccgacactcctacaagatttagaaaaaagtttacaacataatctagtttacagaaaaatcttgngctagaatacttttt

SEQ ID NO: 877 - DNA, 247 bp, Homo sapiens
  misc_feature 229: n = A,T,C or G
ccaagttagtatttgggtttgattcctttggtgaagattaaggcatcaaaacatttcttaaaatgtttgactacaaggctaagttataatgtcaacttttaaagactatgttgtgattcggtttgaatatgctgaagtgagcaattatgatttgcccaagtgcaatacaacaaatctataatgtatatttcacattttctacttgaacacattcatgtatatattttgntaaacttcatatgtattt

SEQ ID NO: 878 - DNA, 606 bp, Homo sapiens
gaagtggatgcccttaaaggaaccaatgagtccctggaacgccagatgcgtgaaatggaagagaactttgccgttgaagctgctaactaccaagacactattggccgcctgcaggatgagattcagaatatgaaggaggaaatggctcgtcaccttcgtgaataccaagacctgctcaatgttaagatggcccttgacattgagattgccacctacaggaagctgctggaaggcgaggagagcaggatttctctgcctcttccaaacttttcctccctgaacctgagggaaactaatctggattcactccctctggttgatacccactcaaaaaggacacttctgattaagacggttgaaactagagatggacaggttatcaacgaaacttctcagcatcacgatgaccttgaataaaaattgcacacactcagtgcagcaatatattaccagcaagaataaaaaagaaatccatatcttaaagaaacagctttcaagtgcctttctgcagtttttcaggagcgcaagatagatttggaataggaataagctctagttcttaacaaccgacactcctacaagatttagaaaaaagtttacaacata

SEQ ID NO: 879 - DNA, 379 bp, Homo sapiens
ctgcatcatcatctaatttgctgatagagccatgcaagtgcacaggaagtttgcagtatgtccaccaagactgtatgaaaaagtggttacaggccaaaattaactctggttcttcattagaagctgtaaccacctgtgaactatgtaaagagaagttggagcttaacctggaggattttgatattcatgaactacatagagctcatgcaaatgaacaagctgagtatgagtttatcagctctggtctctacctagtggtgttattgcacttgtgcgaacaaagcttttctgatatgatgggaaatacaaatgaaccaagcacacgtgtccgatttattaaccttgcaagaactcttcaggcacatatggaagatctcga

SEQ ID NO: 880 - DNA, 389 bp, Homo sapiens
ctggatgagacttccaaacctgacagatgtcagccgagccgggcctggggctcctttctccagccagcaatgatgtccagaagaatattcaggacttaacggctccaggattttaacaaaagcaagactgttgctcaaatctattcagacaagcaacaggttttataatttttttattactgattttgttatttttatatcagcctgagtctcctgtgcccacatcccaggcttcaccctgaatggttccatgcctgagggtggagactaagccctgtcgagacacttgccttcttcacccagctaatctgtagggctggacctatgtcctaaggacacactaatcgaactatgaactacaaagcttctatcccaggaggtgactatgg

SEQ ID NO: 881 - DNA, 347 bp, Homo sapiens
cgccaatatgcactgtacattccacaagcattgccttcttattttacttcttaatgactgtgctgcccctttcacatcaaagaactactgacaacgaaggccgcgcctgcctttcccatctgtctatctatctggctggcagggaaggaaagaacttgcatgttggtgaaggaagaagtggggtggaagaagtggggtgggacgacagtgaaatctagagtaaaaccaagctggcccaaggtgtcctgcaggctgtaatgcagtttaatcagagtgccatttttttttgttcaaatgattttaattattggaatgcacaatttttttaatatgcaaataaaaagttt

SEQ ID NO: 882 - DNA, 187 bp, Homo sapiens
gccgggcatgagctgctgtaaactatttgtggctgtgctgcttgagtgacgtctctgtcgtgtgggtgccaagtgcttgtgtagaaactgtgttctgagcccccttttctggacaccaactgtgtcctgtgaatgtatcgctactgtgagccgttcccgcctagccagggccatgtcttaggtgcag

SEQ ID NO: 883 - DNA, 287 bp, Homo sapiens
  misc_feature 118, 153, 213, 268: n = A,T,C or G
aaaaaagtgatcttaggtttgttttttcatgcgggatgcagatgggtgctatcagagtctctcccacaccactatagtgtaataatgttattattactctacactgaaacgtattcanagttagatattattttagcttcagttgttctttanaggctttcaaatgtaccgatgatactgtttcttgcactgaatatataaacactccacagngtttatattgggaagatattgggaaggaaatatatttgtaaaagatgaaggctgnatctattttttttcttttt

SEQ ID NO: 884 - DNA, 493 bp, Homo sapiens
  misc_feature 53, 60, 72, 78, 472: n = A,T,C or G
ctaaaagttatagtaattctaacctcacattgaaatgagacagtattccttgntatacangctgaatttgangattanagaggatctaatgtttacttaggtaaaggggcataggttttgtagttaagatgaccagacagctaaaagctgtgatgggaagtatggactgctcctatttatagtctcagaaaatggacctttaggtctctatccgtattggcaattattagaagaaagttacacccttttgaaagtacaaaagctgtcttggaatttccccctcttctccctatttatgtccccttagaatattttagggagcctataattattttctaaccaaggaaaaacttaagtctctttaagaagcaattacttttcataacatcagattgaataacccaccttgctgttcagcccacatcctactggaaacaaaaggtaagaaacccattttctggttcttgattgnttgggtctgaattttgttttg

SEQ ID NO: 885 - DNA, 344 bp, Homo sapiens
tttttttttttagaaaaagtcatggaggccatggggttggcttgaaaccagctttggggggttcgattccctccttttttgtctagattttatgtatacgggttcttcgaatgtgtggtagggtggggggcatccatatagtcactccaggtttatggagggttcttctactattaggacttttcgcttcgaagcgaaggcttctcaaatcatgaaaattattaatattactgctgttagagaaatgaatgagcctacagatgataggatgtttcatgtggtgtatgcatcggggtagtccgagtaacgtcggggcattccggataggccgagaaagtgttgtg

SEQ ID NO: 886 - DNA, 466 bp, Homo sapiens
  misc_feature 454: n = A,T,C or G
ccatgggcacaattataaagttgtggtgacagtacatggagagattgaccctgctacgggaatggttatgaatctggctgatctcaaaaaatatatggaggaggcgattatgcagccccttgatcataagaatctggatatggatgtgccatactttgcagatgtggtgagcacgactgaaaatgtagctgtttatatctgggacaacctccagaaagttcttcctgtaggagttctttataaagtaaaagtatacgaaactgacaataatattgtggtttataaaggagaatagctattggggttagcattgcacaaagcccagtttctttctgtgtttgaaaaagattttgatccccttggaatattaagaggtcaacacgtgattgttgtacgtacacattgtgctctggagtgcctatttattgaaatcattgtaagacctgttataaanttaagtctattt

SEQ ID NO: 887 - DNA, 514 bp, Homo sapiens
  misc_feature 454, 472: n = A,T,C or G
aaaaacaaaattcagacccaaacaatcaagaaccagaaaatgggtttcttaccttttgtttccagtaggatgtgggctgaacagcaaggtgggttattcaatctgatgttatgaaaagtaattgcttcttaaagagacttaagtttttccttggttagaaaataattataggctccctaaaatattctaaggggacataaatagggagaagagggggaaattccaagacagcttttgtactttcaaaagggtgtaactttcttctaataattgccaatacggatagagacctaaaggtccattttctgagactataaataggagcagtccatacttcccatcacagcttttagctgtctggtcatcttaactacaaaacctatgcccctttacctaagtaaacattagatcctctctaatcttcaaattcagcctgtataacaaggaatactgnctcatttcaatgtgaggntagaattactataacttttagtagagcacatctttcaacttt

SEQ ID NO: 888 - DNA, 395 bp, Homo sapiens
gtggtcgccctggacaagaacttccacatgaagtgttacaagtgtgaggactgcgggaagcccctgtcgattgaggcagatgacaatggctgcttccccctggacggtcacgtgctctgtcggaagtgccacactgctagagcccagacctgagtgaggacaggccctcttcagaccgcagtccatgccccattgtggaccacccacactgagaccacctgcccccacctcagttattgttttgatgtctagcccctcccatttccaacccctccctagcatcccaggtgccctgacccaggacccaacatggtctagggatgcaggatccccgccctggggtctggtcctcgcccatcctgcagggattgcccaccgtcttccagacaccccac

SEQ ID NO: 889 - DNA, 611 bp, Homo sapiens
  misc_feature 581: n = A,T,C or G
aaaaataaatatgtactacggaatatctcgaaaaactgcactagagacaaagacgtgatgttaatatcttttccccacaattattacggataaacagtagcaccaataaataaatgataacaaatattaaaattaaaaaaggagagagatttagtatgtggaattctctattttttcttgttttgtttttacatataaaaaacagaatagcaatgtctattttatcagaatcacatatatacataaacatatatatatatatacacacaaatacaagttgccaaatatatatatagtatgtagatgtatattgaaaccttatttcaaaggaatgtgtgctggggagccaggggatcggggagggcagagctgagtgttagcaaaattaaatatctgttcaagataagctagtgactgtcaccgatcagggagagagagattggaaacatgaattttatatacaaaaaccggtacaaataagagagcaagagagagcaaaagatacatctcataaatagttgaaattaaatattaaccaagaatactgaaaaaaaaccctactctttaattaaattaactgntttaatttctaattaaaaagggatattaaa

SEQ ID NO: 890 - DNA, 363 bp, Homo sapiens
gtgtatttccctgtggtaaaagagttttactggaaacaattaatgcgatccaaatagacaaaaatatctatgaaagaaagaatacatatggtaagcatcttccttgtctttggcttagccttcttgaccaaaatcttctgtaaacttctttaatttcaacaagtcatgttcattgactgtaggttttgtgttagatagtgaccgcaacatatccgacatggaaacaactggctccaaaagtttatctccagggacatccatccatgtcatttcaatggcaccagggtcacctggagagcaaggtgttagcagatcatctacaagatggttaggatcagctcgggaaggtccgcgaaccttttt

SEQ ID NO: 891 - DNA, 176 bp, Homo sapiens
cctatgaccttggccgcagggctattgcttatgccactcacagagacagctattctggaggcgttgtcaatatgtaccacatgaaggaagatggttgggtgaaagtagaaagtacagatgtcagtgacctgctgcaccagtaccgggaagccaatcaataatggtggtggtggcag

SEQ ID NO: 892 - DNA, 466 bp, Homo sapiens
  misc_feature 333, 430: n = A,T,C or G
cacagttatgaaaatttctatctagcctccgttttgaatggttttaagaaattttgtatatggaggatggaaatgcttatatatttattgaaaatccttttatttgaaattaaaattatttggtatataattgtttgatatttggggagggttttggaggggagataatgtcactgataaattaaaagcctgttgattttgcagaaaggtactgttagtgactgataaggatgcctttgttttgtacatgaaccaaatctttgttttacatttcttttatccaaaatatttaggcatctgacattttcaaccagaatttcaattatatactgngatttttatttgttgcaatacattacaatttcagaggtactttggggctcaaaagctaggatttctaagtcagtatgtgcatttcacacgataaagntgttaatggtgagcaaagtattatatactaactaga

SEQ ID NO: 893 - DNA, 524 bp, Homo sapiens
ctgaatgactggaaatgttcttttcttaacacaatgcccattcattataagttaagctggtcctagtttcttacaaatctcttatttccttgaatttatctactacaccctcactgtgatgccctttaacttataagctgggcctgcccagcctgcttataaagcccctcttcagaaatgtaccaggtgtattaaacagaggcatcatttaatggaaatctgcacttcaaaacagcacttgaaggaccagccattggccctccaatgtaaatacttctcatttcacattatcacagaaacagtgcagtttactaaccactccttccttataagaaattcagtagctgtaaaattttttttcagtttcaaaacatttcaatacttattaattccaaagatccgaacaccatgtagttgtggcattttgggaattagtacactcaggagagaagctgtgtttaggatgaagtgagttggatcatacttcgtatagaaacttgccagaaaatatagaattattggag

SEQ ID NO: 894 - DNA, 257 bp, Homo sapiens
atttagaatagctcgtgttatggaaaaaagtgcactgaatttattagacaaacttacgaatgcttaacttctttacacagcataggtgaaaatcatatttgggctattgtatactatgaacaatttgtaaatgtcttaatttgatgtaaataactctgaaacaagagaaaaggtttttaacttagagtagccctaaaatatggatgtgcttatataatcgcttagttttggaactgtatctgagtaacagaggacag

SEQ ID NO: 895 - DNA, 477 bp, Homo sapiens
  misc_feature 316, 319, 336, 362, 384, 414: n = A,T,C or G
aaaaaactcatgagaagagtaatctgttatgtttttccagatatttaccatttctgttgctcttccttcattattttccaaatttcgttctgcaaatttccacttcttctgatagacgttttttagttcttttagagtggttctgataggtacagattctcttattttttgcttcctctgaggacatctttttctcaccttcattctcagtgatgttttttgcttgtagtatttttagttgacattgttttctgttcagcagtttccttttagcttccgtatttcctgatgagaaatctgcagtcattcaaattgntgnttccctgtatgtagtgngtcatttttctgtcagatttcaaggnatttatctttagtttttagccntttcattatgttggggatgagtttccttgntttattccctttggaatttgctccaattcataaatttgcagttttatgtcttttaccaaactt

SEQ ID NO: 896 - DNA, 201 bp, Homo sapiens
  misc_feature 4, 9, 10, 19: n = A,T,C or G
tatnaccannaagaataanaaagaaatccatatcttaaagaaacagctttcaagtgcctttctgcagtttttcaggagcgcaagatagatttggaataggaataagctctagttcttaacaaccgacactcctacaagatttagaaaaaagtttacaacataatctagtttacagaaaaatcttgtgctagaatacttttt

SEQ ID NO: 897 - DNA, 236 bp, Homo sapiens
  misc_feature 17, 19, 171: n = A,T,C or G
atgcaagacttcactgnancctttcacaggactctgcagatagtgcctctgcaaactaaggagtgactaggtgggttggggaccccctcaggattgtttctcggcaccagtgcctcagtgctgcaattgagggctaaatcccaagtgtctcttgactggctcaagaattanggccccaactacacacccccaagccacagggaagcatgtactgtacttcccaattgccacatttt

SEQ ID NO: 898 - DNA, 475 bp, Homo sapiens
aaaagtaccccccaacacacacaaattgggaatgaaatatgtaattatagccatctttatatgaaatatccaaacaacaaatatatttaataatataaagatagtgccaaaatcaacaaaagctaagaatactgaggcttaactgaccccgattcatatgattttgaaataaaatgttcagactttctagctttatcttaatttgcctttgcttcactgctttatgtagttataatgtaaatctaagagatgcttaaaacagattaaaataatattgttaaaaaacatttttcttatctgagaaaatacaatataatcatatctccctcaaaatactcctgataacattagaaagttctgaagtgtttaatcatatataatgccaccattatcacatgaattcagaactgttacctgaatatttaataaaaaattaagttccatgaggatcataggtctctaaaagctacaattt

SEQ ID NO: 899 - DNA, 402 bp, Homo sapiens
atgatcttcagtatgatcttgtgctgtgctatccgcaggaaccgcgagatggtctagagtcagcttacatccctgagcaggaaagtttacccatgaagattggtgggattttttgtttgtttgttttgttttgtttgttgtttgttgtttgtttttttgccactaattttagtattcattctgcattgctagataaaagctgaagttactttatgtttgtcttttaatgcttcattcaatattgacatttgtagttgagcggggggtttggtttgctttggtttatattttttcagttgtttgtttttgcttgttatattaagcagaaatcctgcaatgaaaggtactatatttgctagactctagacaagatattgtacataaaagaatttttttgtcttt

SEQ ID NO: 900 - DNA, 551 bp, Homo sapiens
  misc_feature 489, 546: n = A,T,C or G
aaaatcagtttattttactcattattcttaatatttaaggaaaacaatgtaaaatgggaaaaaatgtatcttctgctacatcaaaaaagcattttaatccaaaccccactaaaaattataacaagctctgcatgatttcataaaaatgaaaacatgaaagttaacaagcattgaaaatgccaaattatcacaaaatcatagggaggtggtggtggtgatattgcttcttgacttacactgggatttacaacatgattactaatacacttaacactcaaggaaatatctgatacagagaattacttctacattgtggccttccagagggcaaagactattattcatcttcgaatagtcaaattctaacacagtatttggagtaacagtaggtgttaaataaacatttgttgtattgacatgttccttttataattaatgtaatgatttcttggtaatttattatacaatattttctggttagattattgntcaaaagcatattacatattatctaactttaattagatatcaaatattagaaaaggntagtt

SEQ ID NO: 901 - DNA, 364 bp, Homo sapiens
ccatgttcattatttatctatgtttattaatgggccaatgcaaaaaatcattttttcaaagaaaaatttgtccatgtaaagcttaaattataatattgctgctttgtataactcttctatgtttattctattcatttgttcctttccctaccatattttacacatgtatttataatctgtagtatttattacatttctgcttttttctagtcattcaatttatcactgctgaattgcatcagatcatggatgcatttttattatgaaaaaataaaatgacttttcaaattataatgagtaagttttggtctcaataaaataatgcaaacatttcgaaaaaaaaaaaaaaaaaaaaaaaaaaaaa

SEQ ID NO: 902 - DNA, 435 bp, Homo sapiens
  misc_feature 356: n = A,T,C or G
cctttaactctgggctgctgtgtgtggcatgtggttcataccgacggggaaaggcgacctgtggtgatgtcgacgtgctcatcactcacccagatggccggtcccaccggggtatcttcagccgcctccttgacagtcttcggcaggaaggtataagctccatctctgggtgagcaggttgacagagggcagcacaggtctgggggccccctcagagggagaacctcagaagttccagtcctgaggcaggaagcaggggaacagtgctttgccagcatcccatctctctatcggggccggaatcctctccagggagagatggaacagccccgccacacctatgtggaggtgctcantgaaccctgcaggccaagtatctcatctgatctttctgtgacactatgggggagatgggaattactatccatgttttac

SEQ ID NO: 903 - DNA, 298 bp, Homo sapiens
ctttgagaaatcatttacagtaatggagcttgtaaaaattatttacaagaatactcctgagaatttacatgaaatggctaaacataatctcttacttcatttgaaaaaactagaaaaagaaggaaaaatatttagcaacacagatcctgacaagaaatggaaagctcatctttagtttcagattaaagaaagctttgttttattttgctttgagagaatggtatgttttcttaactataggttattttatagagaatataaaagtataaaacattaaaaataaccctagatatacttt

SEQ ID NO: 904 - DNA, 531 bp, Homo sapiens
  misc_feature 510: n = A,T,C or G
aaaaaagaaagacatattttacatgtatgtgtagaaaataatcaggaagaatgtacaccatattaacaggagattattcctaaggtgaagaattatgagtggttcttatttccttatctacttaagttttttctctccaatgggcaggcattgcttgtaccataccttaagcaaggaagtgcatgtttgggacagcagtttgggctctcagcctccttaagagagtcaggtctgcctcatccctgtatctgctagttgagcagaggccagggctgtgtgaggggctctccaacaattgtctttacaaagtataaaaagtcatcagtgatcccaggaacatgtttgtatctcaaattcagagattcaagagggccttagtttaacctcactgatgctcaaattctatttgtaaaggggtagcctgtcctctttcatgggcccctctgcaatgcaagggcttgggagagcaattccgcctccacataggggtttcacagagattttctttanagatagagggattcattttcc

SEQ ID NO: 905 - DNA, 465 bp, Homo sapiens
gttaagatggcccttgacattgagattgccacctacaggaagctgctggaaggcgaggagagcaggatttctctgcctcttccaaacttttcctccctgaacctgagggaaactaatctggattcactccctctggttgatacccactcaaaaaggacacttctgattaagacggttgaaactagagatggacaggttatcaacgaaacttctcagcatcacgatgaccttgaataaaaattgcacacactcagtgcagcaatatattaccagcaagaataaaaaagaaatccatatcttaaagaaacagctttcaagtgcctttctgcagtttttcaggagcgcaagatagatttggaataggaataagctctagttcttaacaaccgacactcctacaagatttagaaaaaagtttacaacataatctagtttacagaaaaatcttgtgctagaatacttttt

SEQ ID NO: 906 - DNA, 255 bp, Homo sapiens
ctgttcaagtagatgagggtaactggcttgaacttgacggatgaactcctgtcctttaattcttatcaagtactcacaccttggaaaccacttggcatgttgaacccatggatcatctccagattcccaacacctgagtccaccatcacagcaaaagcatttgacatcatcactgttacccacataataaaaacccgcacttgcaagctgctcaggattaactagaacactagagggccagttaaagaatgtttt

SEQ ID NO: 907 - DNA, 497 bp, Homo sapiens
cctaaccaagccttggcaccgccagatcctttctgtaggctaattcctcttgcccaacggcatatggagtgtccttattgctaaaaaggattccgtctccttcaaagaagttttatttttggtccagagtacttgttttcccgatgtgtccagccagctccgcagcagcttttcaaaatgcactatgcctgattgctgatcgtgttttaactttttcttttcctgtttttattttggtattaagtcgttgcctttatttgtaaagctgttataaatatatattatataaatatattaaaaaggaaaatgtttcagatgtttatttgtataattacttgattcacacagtgagaaaaaatgaatgtattcctgtttttgaagagaagaataatttttttttctctagggagaggtacagtgtttatattttggagccttcctgaaggtgtaaaattgtaaatatttttatctatgagtaaatgttaagtagttgtttt

SEQ ID NO: 908 - DNA, 314 bp, Homo sapiens
aaaagtaagtgtttgagtaaaaaaattgaaggtacttttttaaggaaaaaaatttatatgccacagtttacatagacatttcagattcaacacgtactcttgaatataatggtttcttttacttggtcaaaatgcatgtatagcatttctttcatcttagttccttgtgtttgcctatgtggtcctttatatattttttattgtatcgaagaaacaaaactatcttcaaaaataagttaatttggatatatttgtcatatcaaactacaaagtgtacaaagttaagtttagcccttttctagaaagtgatcttt

SEQ ID NO: 909 - DNA, 422 bp, Homo sapiens
aaaatgattgctatttttatgtctgcatcaaaaactaatacaaaaaataatttgactaaagtgaaaatttcaaataagtccactggcagatgaaaataaagcaaaaaattacaatagattcctcatcttctacagtagttggtttcaaacgtgtacaaagtaaactctatactatgagaagatgaaatcatcttagaagttagtttttaagatcagtcttaaagatatttcagaacatactagaatatgatctaattattctttcagttgtttacagaaaaatgaaaccacagaattattcctgttacctgggttgaagatcctaatagctaggtgtaaatttggataaggtacagtaattcgaaataagtagtgcatgaagttttaatgtctggtttctctataaagcataaatagatttt

SEQ ID NO: 910 - DNA, 539 bp, Homo sapiens
ctgccgtgtgaaccatgtgactttgtcacagcccaagatagttaagtgggatcgagacatgtaagcagcatcatggaggtttgaagatgccgcatttggattggatgaattccaaattctgcttgcttgctttttaatattgatatgcttatacacttacactttatgcacaaaatgtagggttataataatgttaacatggacatgatcttctttataattctactttgagtgctgtctccatgtttgatgtatctgagcaggttgctccacaggtagctctaggagggctggcaacttagaggtggggagcagagaattctcttatccaacatcaacatcttggtcagatttgaactcttcaatctcttgcactcaaagcttgttaagatagttaagcgtgcataagttaacttccaatttacatactctgcttagaatttgggggaaaatttagaaatataattgacaggattattggaaatttgttataatgaatgaaacattttgtcatataagattcatatttacttcttata

SEQ ID NO: 911 - DNA, 250 bp, Homo sapiens
  misc_feature 238, 241: n = A,T,C or G
ccaaagccttcaaaagccccttatcctctccccaacaaacacagctacttggtgagttggaaaaagaccccaaacttgtctaccatattggcctcaccccagccaaacttcctgaccttgtggaaaacaaccctttagtcgctatagaaatgttgctgaaattaatgcagtcaagccagatcactgagtatttctctgtcctggtcaatatggacatgtctttacattcaatggaagntgnaaatcgact

SEQ ID NO: 912 - DNA, 498 bp, Homo sapiens
  misc_feature 383, 415, 422, 435: n = A,T,C or G
cctaaccaagccttggcaccgccagatcctttctgtaggctaattcctcttgcccaacggcatatggagtgtccttattgctaaaaaggattccgtctccttcaaagaagttttatttttggtccagagtacttgttttcccgatgtgtccagccagctccgcagcagcttttcaaaatgcactatgcctgattgctgatcgtgttttaactttttcttttcctgtttttattttggtattaagtcgttgcctttatttgtaaagctgttataaatatatattatataaatatattaaaaaggaaaatgtttcagatgtttatttgtataattacttgattcacacagtgagaaaaaatgaatgtattcctgtttttgaaganaagaataattttttttttctctagggagaggnacagtgnttatattttgganccttcctgaaggtgtaaaattgtaaatatttttatctatgagtaaatgttaagtagttgtttt

SEQ ID NO: 913 - DNA, 261 bp, Homo sapiens
cctttgagggcaagacattttagagctgggcaaaacctgtgtaggtctcgctgtgggtttgctggggaccaagggggtgatgaaaaggggaggggcggagctcctgcccaagagaggggctgtggggccccaggataaaacagacacagtgacagggccaagagccagcactgctggccttggtgtcatgccagaatctaccaggactgagggagccagaggagtcctgtaggcaggctactgtgctggagcatcccccag

SEQ ID NO: 914 - DNA, 479 bp, Homo sapiens
ctgtcctctgttactcagatacagttccaaaactaagcgattatataagcacatccatattttagggctactctaagttaaaaaccttttctcttgtttcagagttatttacatcaaattaagacatttacaaattgttcatagtatacaatagcccaaatatgattttcacctatgctgtgtaaagaagttaagcattcgtaagtttgtctaataaattcagtgcacttttttccataacacgagctattctaaatgttttacatttctttcagtgcatatttccaaattcattaaacagaatgaaatcaatgttattaaatggctatatcataatattcaagcatattatggaatctataccacagtgggattcacgtcaatactataattcactctagaaaaacatcacaggcacacacaaaataaagaacaaaatttgatttttttttataaatgtaaagtatactatctacttt

SEQ ID NO: 915 - DNA, 465 bp, Homo sapiens
  misc_feature 351: n = A,T,C or G
aaaaacttcaaagaaatatttcagagacaaactttatatacaacttttatatatagttttcctttttgaattatctctgtcatacataaactattgcagattgtgcttagggaaaaatacaactgaaataaacttcattgctcctttctagttgttgcacaaataaacaatgtccaagactctaagatttctttgctttccagtacatacataatactgttaaaagctgaatataatgcactaaaggtcaacacaagttttacttgctaaatacaaatagagaatatatgtttatccttgaaggacacttgttatgaatatgctacaactaaataataagatgttccttanctgctggttttcatatcattcttaatcatttgtggggtactgagatcagtaagactagggagagtctctatcttacattcaacacaatgaatgtttatgggtcttcacaaggca

SEQ ID NO: 916 - DNA, 288 bp, Homo sapiens
  misc_feature 24: n = A,T,C or G
cgtgagccaccacgcccggcccanagaaagatttataactaaatatatagaaaagaataattcccatgattttgtttttgtaaaaagaagtaaggattgttttctatatatttttcaattatgaagtccttgaacatatttggggatttttatggctcaatgttaattttttaatatacttgcaaatacattataataaaataatacaaccaaatcaaaaagcagccacttaaaaactgaaattcacaaaatgagctgttcttggctacatacagaaggccaacattt

SEQ ID NO: 917 - DNA, 540 bp, Homo sapiens
  misc_feature 510: n = A,T,C or G
aaacaaattatgcttcatgtttcctggcttaataaaaagctacaatttttattatccaaattaagaaatattatactaatcaaaagctattaattttgaaatgtctatgtatgtctgtctgtaggtccccttagaacctttccaaacatttataatcaagagattttaatcaattatgtactagaatcatattaaagaaaaacttattttgcaaaaataaaatcactttccaatatgcttgacagaaacaagctattcattttcatttgtgttccactgaagacattactgaaatctgtccaatggtttatttccaagtggtccactatggaattcttcggaatgttttaagattggctgtagctagagttctgacttccatttggaccctgctctccttcactgtttggaggtggttttggttttggcatcttactaagaatggttgccatctcttttctctcatcgaaattcttccactgctcatatagttttacctgcccgggcggncgcttcgagccctatagtgagtcgtattag

SEQ ID NO: 918 - DNA, 192 bp, Homo sapiens
  misc_feature 5, 56, 110, 141, 167, 187: n = A,T,C or G
caaanatatttaactatttagagaatgatttccacctttatgttttaatatcctangcatctgctgtaataatattttagaaaatgtttggaatttaagaaataacttgngttactaatttgtataacccatatctgtgcnatggaatataaatatcacaaagttgnttaactagactgcgtgttgnttttc

SEQ ID NO: 919 - DNA, 353 bp, Homo sapiens
aaacagacataagtatccccttaacctgtacctactttttggatttacgctgttggaagctctgactgtggcagttgttgttactttctatgatgtatatattattctgcaagctttcatactgactactacagtattttttggtttgactgtgtatactctacaatctaagaaggatttcagcaaatttggagcagggctgtttgctcttttgtggatattgtgcctgtcaggattcttgaagttttttttttatagtgagataatggagttggtcttagccgctgcaggagcccttcttttctgtggattcatcatctatgacacacactcactgatgcataaactgtcac

SEQ ID NO: 920 - DNA, 320 bp, Homo sapiens
  misc_feature 12, 17, 28, 43, 62, 69, 81, 86, 87: n = A,T,C or G
ccagtggcgccnatcantctgttatttntcagtttttactttntccttttctttggagacangacagtnaggagaaatagnctctnncctcatttccccctttgagaacctcactcactagtgggagttctcattctcatcctcactatctagatcttcctgtgagacagattaatagtgattcatgtatacttgtgctgaggtgttttgatgaactaagatggtaacgaagcctcttagtaactggagaaatatgtgtaacatacaggggagtaacatgcaggtcctaacactattattatgcctattacaagagtttt

SEQ ID NO: 921 - DNA, 344 bp, Homo sapiens
cagctcccgacaagcccaatgtttatgatttcaaaaccacatatgaccagatgtacagtgatcttcttaggaaagacaaagaactctatacacagaatgggattttacatatgctggacagaaataagagaatcaagccccggccagaaagattccagaactgcaaagacctgtttgatctgatcctcacttgcgaagagagagtgtatgaccagcctcagcagctcatcacatctgttaacctgtagccaagtaccctcagcagttaagcttattataagaaagtgtgttctatttgtttaacctgtgctattttctctttcagacggggcactggtgctttt

SEQ ID NO: 922 - DNA, 231 bp, Homo sapiens
  misc_feature 140, 156, 177, 178, 179, 187, 193, 194, 201, 218, 224: n = A,T,C or G
aaaaaagtgacattgctttattactattggcaggtggggcctgcatgaggtggttagtgtgctcaggggatgggtgggctgtggagatgatgacagaaaggctggaaggaaagggggtgggtttgaaggccagggccaangggtcctcatgtccgnttctgggaagggacagccttnnngaaggagncatggnnagccatngctaggccaccaatcanattaanaaattct

SEQ ID NO: 923 - DNA, 335 bp, Homo sapiens
  misc_feature 258, 266, 269, 282, 289, 314, 325: n = A,T,C or G
aaatcatttatctggatttttatgttttattagcattttcaagaagacggattatctagagaataatcatatatatgcatacgtaaaaatggaccacagtgacttatttgtagttgttagttgccctgctacctagtttgttagtgcatttgagcacacattttaattttcctctaattaaaatgtgcagtattttcagtgtcaaatatatttaactatttagagaatgatttccacctttatgttttaatatcctangcatctgntgnaataatattttanaaaatgnttggaatttaagaaataacttgggntactaatttgnataacccata

SEQ ID NO: 924 - DNA, 424 bp, Homo sapiens
aaaaatacaagggtattgatatgaaattatgtaaatttcaaatgcttatgaatcaaatcattgttgaacaaaagatttgttgctgtgtaattattgtcttgtatgcatttgagagaaataaatatacccatacttatgttttaagaagttgagatcttgtgaatatatgcctgtcagtgtcttctttatatatttattttttattagaaaaaatgaagtttggttggtgatgcatgaaacaaaatagcaagagagggttatagtttaatagtaagggagataacacagcatgtgtagcaccagttgataattggtctctagtagcttactgtcaaaatgttcaatgaagtcttctgttcatctgttgaaactaggaaaatacccaaacttaaatggaagaattctgaaagagaggatagaattt

SEQ ID NO: 925 - DNA, 210 bp, Homo sapiens
ctgaataggcacccaaaagtccgtgactaaatttcgtttgtctttttgatagcaaattatgttaagagacagtgatggctagggctcaacaattttgtattcccatgtttgtgtgagacagagtttgttttcccttgaacttggttagaattgtgctactgtgaacgctgatcctgcatatggaagtcccgcttcggtgacatttcctgg

SEQ ID NO: 926 - DNA, 364 bp, Homo sapiens
aaatttgaggaattttaatacataaaatacaatgtacaaactttctgcccactcagatctcttctccatcatgtacttagtatttcccattaacctacacactgatttttatgctactccttgtagaaacaaaattctggtttgactcagtttttgtgtttataaacttttggaatgtgtaccccgtttatgtgaagaattatgacctatcagtcatagctaaatagtgaacctcaaaagtgttaacttttgactattcatgtgaggtttggtatcttgcatttatgtacatggctgtaaattatgtgcatttactctgtatttatgttatctagctgacttttacttgaattgttcaaatttt

SEQ ID NO: 927 - DNA, 363 bp, Homo sapiens
aaaactcttataataagagtaataatagtaataggaacctgcttactgctcccttgtctgatacctgtatttctccaaatgataaaaaacttcgtcgcttaaccttagttcaccaaaatgcttcagcacaagcatactatataaatcactatcaatctattgcacgaaaatacataagtagcaaaaataagagtgagaactcccactgataaaaagtgagagtctcaaagaggggaaatgagggaagagagagaccctctcatattgttttatattgttttatactcagtacctcttttaagaaaaaaacaacaaggaagtagaaccaaagacaagcagcccagcgccaggcccaaaaccagg

SEQ ID NO: 928 - DNA, 424 bp, Homo sapiens
  misc_feature 345, 381, 388: n = A,T,C or G
ctgaaccgcccggctgagccgacattgccggcgtcttggcgattcggcccgacgagctccgctttcgctacagcatggtggcctactggagacaggctggactcagctacatccgatactcccagatctgtgcaaaagcagtgagagatgcactgaagacagaattcaaagcaaatgctgagaagacttctggcagcaacgtaaaaattgtgaaagtaaagaaggaataatctaccctgactaaagcttgaaatgctacatttccaaggtgaagatgtgtgggcacatgttatggcagattgaaaaggatctcattccatgggaaaaaaaaaaatcctgtcttgntcataaattgacaatgtcaataaattgaaatatggntcactgntaaaaaaaaaaaaaaaaaaaaaaaaaaaaagcttgt

SEQ ID NO: 929 - DNA, 584 bp, Homo sapiens
  misc_feature 504: n = A,T,C or G
ctttgatttgaaagctgataagtatttctgcagcagatagaatattaaaatcaggttgtgtgtacacactgcactatgaggtaccttggtgtcctggtgtgaatagacaagaagctgtactatatgttgctctctcagtggcaacaatgaagttttcgcaattctagaacttggattttttttaacaaaagtcccaaaacaccaaaaatgtaaacaagataagagattaatattgtagtgatgtaatttaattaaagttatattttgggttaattttaacaactgaagtcttattgttgaaacttattttcaacaaaactgtgcagttaaatttgtatacgtattcacatactgaaagatgaaccgttaaaatagcacttaattttgtgtttcttcaatatgtcttgatatactttgtgcaattaatattacacatgtaagttgtatggcagtttacagaactcaatgacttgtcatgaggttttcatatgagctacacattgngtacattgattggtttttatttttacataaatccattctgtcattttcaactttatatataaatctccaatgttatggga

SEQ ID NO: 930 - DNA, 264 bp, Homo sapiens
  misc_feature 87, 111, 125, 132, 169, 182, 229, 244: n = A,T,C or G
tgaaatccacatgtattaacagaaagatcccacaattgttgaggggggatcaagttgcagaatgatacagatagtacaatgactttnttgtaaatttgaattaaaagtttnctcataaaactcantactatntattggtaatggatgcatatatgtatgtacatgtttntgaaacggattgnaaggatacagaccaaactcttgatagtggtcacctgtgaagagtggngaagggaaaataatnagtgtgggaggtgggatggg

SEQ ID NO: 931 - DNA, 543 bp, Homo sapiens
ccaagacagcctgtttcagagggttgttttgtttggggtgtgggtgttatcaagtgaattagtcacttgaaagatgggcgtcagacttgcatacgcagcagatcagcatccttcgctgccccttagcaacttaggtggttgatttgaaactgtgaaggtgtgattttttcaggagctggaagtcttagaaaagccttgtaaatgcctatattgtgggcttttaacgtatttaggggaccacttaagacgagattagatgggctcttctggatttgttcctcatttgtcacaggtgtcttgtgattgaaaatcatgagcgaagtgaaattgcattgaatttcaagggaatttagtatgtaaatcgtgccttagaaacacatctgttgtcttttctgtgtttggtcgatattaataatggcaaaatttttgcctatctagtatcttcaaattgtagtctttgtaacaaccaaataaccttttgtggtcactgtaaaattaatatttggtagacagaatccatgtacctttgctaaggttagaatg

SEQ ID NO: 932 - DNA, 277 bp, Homo sapiens
  misc_feature 239, 246, 253, 256, 269: n = A,T,C or G
ctgacagcaaggaatgccaaaacttcccccttgtcaagtgacaaaataaccactggatataaatataaaagactacagagacagattcctactggcatttatgaatgcagccttttgtgcaaatgtaatcgacaattgtgtcaaaaccgagttgtccaacatggtcctcaagtgaggttacaggtgttcaaaactgagcagaagggatggggtgtacgctgtctagatgacattgacanagggacntttgttngcntttattcaggaanattactaa

SEQ ID NO: 933 - DNA, 460 bp, Homo sapiens
gttctacctgctgtgagctgcccagtgggaagtatggctgctgcccaatgcccaacgccacctgctgctccgatcacctgcactgctgcccccaagacactgtgtgtgacctgatccagagtaagtgcctctccaaggagaacgctaccacggacctcctcactaagctgcctgcgcacacagtgggggatgtgaaatgtgacatggaggtgagctgcccagatggctatacctgctgccgtctacagtcgggggcctggggctgctgcccttttacccaggctgtgtgctgtgaggaccacatacactgctgtcccgcggggtttacgtgtgacacgcagaagggtacctgtgaacaggggccccaccaggtgccctggatggagaaggccccagctcacctcagcctgccagacccacaagccttgaagagagatgtcccctgtgataatgtcagcag

SEQ ID NO: 934 - DNA, 405 bp, Homo sapiens
cctaagttattgtttgcataaaaagaatcatgttccctgtgtacatttaagaaaaaaacaaaaaacggaaatgtcagaattgtatggaaataaaacttgtttgaaaatttggaatagtgctgctgccagcttatttttctggtacttgtattttcacatgttaaatgatctttatatatgttgaattaacaaatattttgagtttctgagaaaaaacaaaacatattaatggtattgaaatgtgttagtagtctggctgtgtgcccaaaattctgtttcgcagcaaaagtgaagacctgtatgtaaagaaagtataacaattatttctttgtattttaggggctttaaccggaacatcgtctagctggtgttaggaatgtttgcttaatttccagactttttttt

SEQ ID NO: 935 - DNA, 556 bp, Homo sapiens
  misc_feature 524: n = A,T,C or G
ctaactcaggaaactaacaaggtggagacgtacaaagagcagccgctcaagacacctgggaagaaaaagaaaggcaagcccgggaaacgcaaggagcaggaaaagaaaaaacggcgaactcgctctgcctggttagactctggagtgactgggagtgggctagaaggggaccacctgtctgacacctccacaacgtcgctggagctcgattcacggaggcattgaaattttcagcagagaccttccaaggacatattgcaggattctgtaatagtgaacatatggaaagtattagaaatatttattgtctgtaaatactgtaaatgcattggaataaaactgtctcccccattgctctatgaaactgcacattggtcattgtgaatattttttttttgccaaggctaatccaattattattatcacatttaccataatttattttgtccattgatgtatttattttgtaaatgtatcttggtgctgctgaatttctatattttttgtaacataatgcactttanatatacatatcaagtatgttgataaatgacac

SEQ ID NO: 936 - DNA, 326 bp, Homo sapiens
  misc_feature 21, 167: n = A,T,C or G
ccaagaaaaatgtaaccttgnaaatagcacagcgttctcataatggaaacagttgcaaagaacataaagtacagctgcgttacatgtaacaaaagatgcaaacaaaatagattcaagttgttttgcagacagcacaatgatacaatattaggactacagaatctcanagtaaaccacaatgatttaaaggtaagatacacagaaataaaatgattttaacagaaaaatatgacattcctgaccttaggtctgggcacatgatgtctgacccctatagaggcaccttggctaaaatgggaatgacctagtgccatggctgacctcac

SEQ ID NO: 937 - DNA, 331 bp, Homo sapiens
  misc_feature 54, 210, 314, 321: n = A,T,C or G
gtctgcattcatgccttaactcgggttactgcacaactttagttcttgacttantctgcaccgtcatctagattgtattgtacatctcggtctgaacttcatcctggcaaaaacaaagttgcaggcacaacagtttaagaatgcattcctccagaagagtatctggtcaggttgaccctgagccttctttggacttgatttggaacttancctggaaagcgaaagtggactgtccaacagaaagatgtcaacaaggaaaagaggagagccaagcgctagcatgccttttgcctctgcatatctgtgcacactgnatgttgntcatgatagc

SEQ ID NO: 938 - DNA, 325 bp, Homo sapiens
  misc_feature 6, 12, 29, 34: n = A,T,C or G
ccaatncattanaactttttttctcgccncatancacttctttcttgcctctttcatttctgctcctggtgttgcctgcctcctgcaagacccagatgaagaaaccttttcaatggtcgagatctgagacttggagctggaggggctgaaggcttgaaggaaggtggttactggtcaaaaggagaagttcatttgcacaaaaatataaactggggaggatgagaccagcacatacacatatggattgatctacaatccatataaaaaaatagacccaaattgtcattttacatttgcaatattatacaaaataatatatattttt

SEQ ID NO: 939 - DNA, 567 bp, Homo sapiens
ccttctgggcatataagctattggaacttgtcatcacttaaactatttcctataaagatgaaaatcaggctaataaaaagtatttttagaaattaggctgaaaacctctaagtttggtaaaagacataaaactgcaaatttatgaattggagcaaattccaaagggaataaaacaaggaaactcatccccaacataatgaaatggctaaaaactaaagataaagaaaaataccttgaaatctgacagaaaaatgacacactacatacagggaaacaacaatttgaatgactgcagatttctcatcaggaaatacgtaagctaaaaggaaactgctgaacagaaaacaatgtcaactaaaaatactacaagcaaaaaacatcactgagaatgaaggtgagaaaaagatgtcctcagaggaagcaaaaaataagagaatctgtacctatcagaaccactctaaaagaactaaaaaacgtctatcagaggaagtggaaatttgcagaacgaaatttggaaaataatgaaggaagagcaacagaaatggtaaatatctggaaaaacataac

SEQ ID NO: 940 - DNA, 297 bp, Homo sapiens
  misc_feature 84: n = A,T,C or G
aaactcttcaatctcttgcactcaaagcttgttaagatagttaagcgtgcataagttaacttccaatttacatactctgcttanaatttgggggaaaatttagaaatataattgacaggattattggaaatttgttataatgaatgaaacattttgtcatataagattcatatttacttcttatacatttgataaagtaaggcatggttgtggttaatctggtttatttttgttccacaagttaaataaatcataaaacttgaaaaaaaaaaaaaaaaaaaaaaaaaaagcttgtac

SEQ ID NO: 941 - DNA, 456 bp, Homo sapiens
  misc_feature 37: n = A,T,C or G
aaaattcaattcaaagattcaataactatcaacattnctaaacactgatttttctttttctctttttcaaatgttttttaatatcctgcaggtaataacactgatttttctaatactcagaaacatctacttagcagttgtgatactaatttgcaaaatgtaataatgttatacaaatataagatactactaaatacatagtagaaataattgcatgattcctgatatttatattcaaggtataaacatggctgatttcgctgatactacagaataaaaaaaataaagctgctatgtaaaaaattaaagaatatctcaattagatatttttgttcccaatctctttcagacagatctatgaaataatatagaatatactatcaatatgttctttcatatgaagtgaaaaaaatgggatttaagtagtgagataatttctattttttacttttttac

SEQ ID NO: 942 - DNA, 516 bp, Homo sapiens
ctgagggctccatgccgaatccatacacaaggtttgtggttctcagaagagttttcagacaggaactgtttccaacttaaaatctttcaacagacaaatggaggtggaagggggatggtttacacaaagtatttccaaatgtaatcaggaaatggaagtgtaaattaaaaccgttttcaacatgtatctcctctttagaaatatcactgcttggagaatgttgtgacaagcaaccaaatactcagaagaccttatccaccagaatactggcaggactcacattactttgcatgtcataattaagaaaaatatccaaatttgatgccatttatagtgtgtacagtcaaaaatgtgtatgctgattttgatgagcaggagaaaggactgggtggtgaggaaacatgaactatgcacaacatgagacaactgtgctgtctcacgaagacacgacactcacctatggagtgtccagactgaaaacctctgaataacgcacacatttgtgtcaagtaacac

SEQ ID NO: 943 - DNA, 527 bp, Homo sapiens
  misc_feature 516: n = A,T,C or G
aaaatgcttctgtaaaatggagaactctattgctccacaagaaaatgtatatgtaaaactacaggttggctatggtaatagtaactaaactacatccaaccctgaaggtagaaaaatccctgaaaagaaatacacagcctagtcatagtatatcatataaaggttattttcttattttgaaaattctcccagatttggagaaatccaaacctttccatagttcccttactaggcagtgccacataaagttatttagttaacattatgatcatggcttacgattaaattccatatgacaaacacttatatatagcagccgtcattttggatgttggttatgacaatatttgcagtttgattacagaacacgcgttcattaaatttggtacaaagcatgaacactcaggacagattggcacaatacatgcagttcgagaattctcttatcatctcaagccagtcatcactgaataagccatagtcccagtctcgttttccaaatctttctcatattgnaactgacattt

SEQ ID NO: 944 - DNA, 402 bp, Homo sapiens
ccaccaatggtactgaacctacgagtacaccgactacggcggactaatcttcaactcctacatacttcccccattattcctagaaccaggcgacctgcgactccttgacgttgacaatcgagtagtactcccgattgaagcccccattcgtataataattacatcacaagacgtcttgcactcatgagctgtccccacattaggcttaaaaacagatgcaattcccggacgtctaaaccaaaccactttcaccgctacacgaccgggggtatactacggtcaatgctctgaaatctgtggagcaaaccacagtttcatgcccatcgtcctagaattaattcccctaaaaatctttgaaatagggcccgtatttaccctatagcaccccctctaccccctcta

SEQ ID NO: 945 - DNA, 499 bp, Homo sapiens
ccaccttcaaagcatgtgctcttcaggaaagcattttccataggaacctttttccacaggaacctttttccctaggaaactttttccataggaagcaccatcccttggtaaggatgtgcagtagtttatttaaccagaccctacttctgaaacgttactattatccaccacgctgatctgaacgtccaggggcatatgtatctgtgcacttctccaattatttctcaggataaacacccgaaaaggaattcgtggctgaaaaggtattgatttagtgttcatcggttgctttctgtgttaatctgtgtccttcccgacagtgaacgtgagcacgctgaaggcttacttcagatgcgatggctacaagggctacgacctggtctacagcccccagagcggcttcacctgcgtgtccccgtgcagtaggggctactgtgaccatggaggccagtgccagcacctgcccagtgggccccgctgcaggtgcatagggctgtgg

SEQ ID NO: 946 - DNA, 425 bp, Homo sapiens
aaaaacagctcttaacattgctgaagttgggagaactttccatctcttcttaataacagtgcaagattttgtaaattcttttttgtgtttaatgtttaataaaacgagtattaagcttaaattactgaagtacctgggagaagtaatgatgtgtactttcaaaaaatggaaaatgcttttattttattttctataatttgttaacatgatatgtaaaattaaacttcggagcacaatgaaatgccgattatttttaccttgtttgggcttaaagtaggtatttaaggtttatgtgttcaaaatgccttggtaaattggatgacctctaactttactgtccatatggagtttgtcattctttatggataagagaacttaaggaaaagttactgtttttcttcagtctttttatatctatctgattt

SEQ ID NO: 947 - DNA, 363 bp, Homo sapiens
  misc_feature 13, 14: n = A,T,C or G
ctgcatcacggtnnaaaatggagaactctattgctccacaagaaaatgtatatgtaaaactacaggttggctatggtaatagtaactaaactacatccaaccctgaaggtagaaaaatccctgaaaagaaatacacagcctagtcatagtatatcatataaaggttattttcttattttgaaaattctcccagatttggagaaatccaaacctttccatagttcccttactaggcagtgccacataaagttatttagttaacattatgatcatggcttacgattaaattccatatgacaaacacttatatatagcagccgtcattttggatgttggttatgacaatatttgcagtttgattac

SEQ ID NO: 948 - DNA, 140 bp, Homo sapiens
  misc_feature 14, 18, 56: n = A,T,C or G
aaatggggatagtnttcntgaccacaaataaataaaggaaaactaagctgcattgngggttttgaaaaggttattatacttcttaacaattctttttttcaggacttttctagctgtatgactgttacttgaccttcttt

SEQ ID NO: 949 - DNA, 590 bp, Homo sapiens
  misc_feature 565: n = A,T,C or G
gcaaatatagaagactgtattttttactatgatatccattttccagaattgtgattacaatatgcaaagagtcataaatatgccatttacaataaggaggaggcaaggcaaatgcatagatgtacaaatatatgtacaacagattttgctttttatttatttataatgtaattttatagaataattctgggatttgagaggatctaaaactatttttctgtataaatattatttgccaaaagtttgtttatattcagaagtctgactatgatgaataaatcttaaatgctttgtttaattaaaaaacaaaaatcaccaatatccaagacatgaagatatcagttcaacaaatactgtagttaagagactaactctccacttgtatgggaactacatttcactcttggttttcaggatataacagcacttcaccgaaatattctttcagccataccactggtaacatttctactaaatctttctgtaacacttaaagaattccctcattcattaccttacagtgtaaacaggagtctaatttgtatcaatactatgttttggttgnaatattcagttcactcacccaatgt

SEQ ID NO: 950 - DNA, 396 bp, Homo sapiens
aaaagtagatctaagactgttagcttccttaactactgagacactttctaaaagtcacactactgaaaagagccgctttaagaattaatgtattccactggggttaaatcatttctgatttccctcaggagggtagtaatatctactagcactagtgcccagaatcaaagtttatatcatctaaaaaaactcaacattttatagactctacaatgcatggattacttttattcatatgaaagtaatataaaatgttacctaacttaaataatataaaatatcggtttaaccaaattaacaatcacaaaactgcagacatttttctattaaagttttccagttcactgagcaatatttactgaaaaatatgattatgaacttaaatatgtcctcttt

SEQ ID NO: 951 - DNA, 503 bp, Homo sapiens
  misc_feature 68, 80, 84, 101, 187, 252, 324, 354, 385, 406, 460, 463: n = A,T,C or G
caagcttttgttttttttttttttttttttttttgttttcaaaggcttttaatgaggttaaaaaaaanataaaattcctnttanaaaataacacttagcanttaatgacatcaaagtcacattgactaaagaaggaaaatagcaaccaattgttaaagccaccttaacataaaccttattgcaagtntacacatcttttgaacacaatctatagaaaagagaataacttccaaggcattacaactttttctntggcatgttaaaaaacaactctgactaatggctaatgcattataaaatttcctatctgacaaatctttctanattatgcatagtattttacttttgaaaggncataaaaaagatataaatcagtttccataanagctaatattggcccataacnaaagtttccttcaggttattttaatgtattaacgtaagaaaactccaggtgaanaanaatttcaagccaaaactaagcattaaaaaatacctcggcc

SEQ ID NO: 952 - DNA, 564 bp, Homo sapiens
aaacattacccagcatcattgtttataatcagaaactctggtccttctgtctggtggcacttagagtcttttgtgccataatgcagcagtatggagggaggattttatggagaaatggggatagtcttcatgaccacaaataaataaaggaaaactaagctgcattgtgggttttgaaaaggttattatacttcttaacaattctttttttcagggacttttctagctgtatgactgttacttgaccttctttgaaaagcattcccaaaatgctctattttagatagattaacattaaccaacataatttttttagatcgagtcagcataaatttctaagtcagcctctagtcgtggttcatctctttcacctgcattttatttggtgtttgtctgaagaaaggaaagaggaaagcaaatacgaattgtactatttgtaccaaatctttgggattcattggcaaataatttcagtgtggtgtattattaaatagaaaaaaaaaattttgtttcctaggttgaaggtctaattgatacgtttgacttatgatgaccatttatgca

SEQ ID NO: 953 - DNA, 528 bp, Homo sapiens
aaaaaactcatgagaagagtaatctgttatgtttttccagatatttaccatttctgttgctcttccttcattattttccaaatttcgttctgcaaatttccacttcctctgatagacgttttttagttcttttagagtggttctgataggtacagattctcttattttttgcttcctctgaggacatctttttctcaccttcattctcagtgatgttttttgcttgtagtatttttagttgacattgttttctgttcagcagtttccttttagcttacgtatttcctgatgagaaatctgcagtcattcaaattgttgtttccctgtatgtagtgtgtcatttttctgtcagatttcaaggtatttttctttatctttagtttttagccatttcattatgttggggatgagtttccttgttttattccctttggaatttgctccaattcataaatttgcagttttatgtcttttaccaaacttagaggttttcagcctaatttctaaaaatactttttattagcctga

SEQ ID NO: 954 - DNA, 426 bp, Homo sapiens
aaaatcaattttgttttaatccaaggcacctgtaaaacacttgctggtgtgagagaagtgaacaaattcaattatacaaaatagtacagaaatgaaagaatcctggcagtgattgatttttccacagagcaaacctttttgttcagaaatgagctccttaaagtcaatgattttgagaaaaaccacacttcaaatatgatacacatcatgtgaactactttgctgagtgattttcaagcaaagtataccactaagtataaaagataaaaggctcatgctcatgctgtttcataatagccatctccatttgtagtaagaataatcagaatgattccccttgaatttcagcctgaaaaatgtatactgcatagatctggtattcctttaatgcacaggcacatatgaccatggactttataatactgg

SEQ ID NO: 955 - DNA, 310 bp, Homo sapiens
gttcctcatttgtcacaggtgtcttgtgattgaaaatcatgagcgaagtgaaattgcattgaatttcaagggaatttagtatgtaaatcgtgccttagaaacacatctgttgtcttttctgtgtttggtcgatattaataatggcaaaatttttgcctatctagtatcttcaaattgtagtctttgtaacaaccaaataaccttttgtggtcactgtaaaattaatatttggtagacagaatccatgtacctttgctaaggttagaatgaataatttattgtatttttaatttgaatgtttgtgcttttt

SEQ ID NO: 956 - DNA, 235 bp, Homo sapiens
  misc_feature 40, 103: n = A,T,C or G
aaaaacaacaacaaagaaggcagagccaggatataactanaaaaaggatgtcttttttttttttttactccccctctaaacactgctgctgccttaattttanaaagcagcttactagtttacccttgtggtataaagtattataaattgttgtgaatttgaagaatccgtctactgtattattgctaaatattttgtttatactaagggacaattattttaagaccatggattt

SEQ ID NO: 957 - DNA, 361 bp, Homo sapiens
gaagaaggtagataatgactataatgcccttcgagaaagactcagcaccttgcctgataaattgtcttataatataatggtaccatttggcccttttgccttcatgccaggaaaacttgtccatactaatgaagtcactgttttactgggggacaactggtttgcaaagtgctcagcaaagcaggctgtaggtttagttgagcaccggaaagaacatgtaagaaaaacaatagatgacttaaaaaaagtgatgaaaaattttgaatccagagttgaattcacagaagatttgcagaaaatgagcgatgctgcaggtgatattgttgacatacgagaagaaattaaatgtgacttcgaattt

SEQ ID NO: 958 - DNA, 478 bp, Homo sapiens
aaacaaacaacaaatttcgataccaacttcttgggcttcaagctattgagcacttatagccaaactatcaagtatagttatgatatagacagtccaaatttatagaaaatattacaaagacaaatgccttgaaaagatgacacagtgcagggaaaactacagctattaagctggtataaaaacttagtcaaaatgttttagtccattatggctctgcctaaagcttcaaaggaagaaaatttaagacacttctcatccaaggcacttaaaagagttgcaataaagtacttctttgaatttagtttgagcccaacagtattttttattcctttttcacattctgactcacactgaaacagtccttgaaggcagctattaatgaggaaaaatagttattgcttcttaatatacatattacaagtacgcaaacagaatacagatttcggtccactgaagcaagtaacaggatctgactgca

SEQ ID NO: 959 - DNA, 452 bp, Homo sapiens
  misc_feature 448: n = A,T,C or G
atttctcagggcaaaggaacctggctcatttgaagattaatgttccatgcctttgtggtcaaacggtcagcacttaacacaggaaaaaactaggtgttgttttgttttgttattttggacaacataaaattcaggaatgttttatttagccttggtttctagaaggaagggaaataatatttcttgagcatttactagggtgttgcgtgctgtgctaagtaaattttaagtctttcagttttatagatacggaaaacaagggtgactctttaccacaggatgaataaagaactaagtaatatgggaatgcagcaatttctggactagctgagccgattccttcctgtgagcacactgtaagctttcagttctctgggcaggaattacagcacctgtcccctgcaatggccctgctgtgtgatgctcatcgcttcccttcgtgctggancagt

SEQ ID NO: 960 - DNA, 427 bp, Homo sapiens
acacaataactctaacttgacttctaaccattctatcttattgatttggaggctgtcttctgccagattttttgtggcttgagatgatattttcgaacccttctttcactacctttcttacccttaatgtgccaagcttgaaacaggatttgatttcctgagctacttgttcgccttctgtgcgtcaccaagtaatctggttcatctttcgtctcattcatgttattttcaagtgaaacaagacattttgggggtcaagtctctttgggtgttttgtttttatgtatataaaaatggattttgtgttccctttccatgtaagtaccaacttatatggaaactcacaatcataatgtaaagaagaaatgaaagcctggtgtattgtacttcaagatgcctccctgatgtatagaatctccttgtaaaa

SEQ ID NO: 961 - DNA, 123 bp, Homo sapiens
aaaaaaatgtaagtgaagatggaaggctggagagaatgattgctttttgtacagttaaataaggtcacaatattcttacatactttgttttacaactgtgttttcattttttcaaatgtctgg

SEQ ID NO: 962 - DNA, 368 bp, Homo sapiens
aaaaatccataatctgctagttttgcatgtacttatatgaaaacagtgcagtaagttgaaaactcagtatctatggaattgataaatgttgatctggtgtagtatattttatcgcattttcttatattaaaaaatgtctgcatgattacattttatttcctttgtaatttacatttcagaatagtgtattgctatatgggtgccaagattgaatatgaagaacccgagtgtttgtagtattatagttttaagcaaatctgtgtggtgatacagccataagaatggggcttatataaactctgtacatgtaagattttgtacagagaatttttaactttataaattgtatatgaacatgtaaatctttt

SEQ ID NO: 963 - DNA, 269 bp, Homo sapiens
gtttctgcaggggatgatattggtgagttgccaaagaagcaatacagcatatctgcttttgccttctgttgtttatcttacctgcagatattaagaatgtatgcattatgtaaaatgctcaattatatatttttgttgagttttttaattaaagacttgtaaaaaaaaaaaaaaaaaaaaaaaaaaaaaaaaaaaaaaaaaaaaaaaaaaaaaaaaaaaaaaaaaaaaaaaaaaaaaaaaaaaaaaaaaaaaaaaaaaaaaaaaaaaaa

SEQ ID NO: 964 - DNA, 298 bp, Homo sapiens; identical to SEQ ID NO: 903

SEQ ID NO: 965 - DNA, 175 bp, Homo sapiens
ctgccgtgccatatcctgcttggcccgctgcagggcggcttccagctcctcctgcttggcacgagcatccttgagcgccagctccccacgctcctcagcctcggcaatggcggcctccaacttggcacgctggttcttgatgttgtcgatctcagcctgcagcctctggatggcc

SEQ ID NO: 966 - DNA, 346 bp, Homo sapiens
aaaattaggaggatgatgcatgtcctactttgattcaaggagaaaggacaagttcttagtacagtaaaacaaaacacaaaagtaaacaaatctttagaaatcactatatatatgtgtgtttatatatatatttttatataattaggattatcatcatttcaaactattaaaaataaggttgccaccttaccttttcttttggtaatggggtgttattttttttaagagaaaaaaccaaacattttgcccagactctagagtttcccaacttcaattctgttttctgctgtgcaacttccccaccttcacgctgtatccccaagtcccgccaccaattctggctggc

SEQ ID NO: 967 - DNA, 410 bp, Homo sapiens
aaaaattttaatgatattcatcgttgtatatgacaatgtcagaaatttcattaggacaacaattaataaaagcgcctatccacggcaaaaatgaaagatgagttttcacagcaggaaattagtgctgaatcagtgactcctgaagtcgttacagcaacgcttgcgagatgttgcattttcctctgctagggcacactgcttgggcggtttaatattgtttttttctcccttagaatttgatgttatcaaagctaccattaacattttacttaaagtttttaggagaaactcttcacaaagttaatagtgcagatcttctagtaattaagatcatttcagatgtgcctgaaatgagtaccacatgtggatgagtttgctttttccattccattaagttcggtagaaatttt

SEQ ID NO: 968 - DNA, 430 bp, Homo sapiens
ccagttaaatgctttcgttcacttttgaattttaacagaatataggatatatcagtttggacttgttttttgttgttgttgttttttgttttgttttgaagttcagtgcacttttttttacagtaagattacaaaaatttaggaacatgatggattaatgagagtgggaatagatgcacttgagatgtgtatgtatagatacctatctatggataaatagaaatctgtacagatagatatctatctatatatggacttagaagaaattaagatgagtccattaattcatggtcaatttctcaataaagtgttagcaaatgtactaggaatgattctggccttctcatccatctccttccctgacttagttctgacgatggcccagctccgtgtttctttaacgagtgcaagttactaagagataccattt

SEQ ID NO: 969 - DNA, 535 bp, Homo sapiens
  misc_feature 60, 70, 78, 365, 470, 531: n = A,T,C or G
cattattaacataatgtgtacaagtccttttgaaatgacaactttaatgggtttcagctnttttatctanagcttganataattcaagctgagtttttcagggcatatcacaacggcaaagtgttcagcagtgggatatcaatgcttatttacattttcctactgctatttatataaaatgttattccattcagaggatgccttttatccccacattaaagcacagatcattaagcaataaaaaccaaattgtctgtcattcaaattataactgcagttatttttgcatggtaagagtgaggtgctaattttgtgtgagatgaactttgtaaactactttgggaaatgttctttggaagtaaggntttttctcctttagtcttatgcttccacttttgtctcagattcacaatccattaaaacatggggaaaaaagaaaaggtaaaattgagagacttttgttagagganctatttggaatgaaccaacatttcagattttccaaaatgtaagttaggaagtctccattgnctct

SEQ ID NO: 970 - DNA, 365 bp, Homo sapiens
  misc_feature 46, 62, 185, 224, 250, 256, 268, 331, 334: n = A,T,C or G
cctttagcaaggatgccaagacaattccgtggagaaaggatatttntctcaataatcagcantgggacaagtggagatccacaagcaaaagaatgaagctggacccctacatcacatcatatataaaaatatactcgaaatggatcaaagaccattgtgagaactaaaactatacaagttcttanaagaaaacacaggcattaatcttcttgaccttggattangcaatggttttctagatatggcaccnaaagcncaagtgacaatngaaaaaaaatacgtatcttggaaatcatcaaagttaaaaagttttgtgtctcaaaggacaccnacnagaaactgaaaacaatccacagaaggggagt

SEQ ID NO: 971 - DNA, 233 bp, Homo sapiens
aaaaatcaggtaccacttgatttcatacgggaaattgaagcaggaaatattgagggcttcttgatcacagaaaactcagaagagatagtaatgctcaggacaggagcggcagccccagaacaggccactcatttagaattctagtgtttcaaaacacttttgtgcgttgtatggtcaataacatttttcattactgatggtgtcattcacccattaggtaaacattccctttt

SEQ ID NO: 972 - DNA, 388 bp, Homo sapiens
  misc_feature 315, 346, 358, 369, 381: n = A,T,C or G
ctgtcctctgttactcagatacagttccaaaactaagcgattatataagcacatccatattttagggctactctaagttaaaaaccttttctcttgtttcagagttatttacatcaaattaagacatttacaaattgttcatagtatacaatagcccaaatatgattttcacctatgctgtgtaaagaagttaagcattcgtaagtttgtctaataaattcagtgcacttttttccataacacgagctattctaaatgttttacatttctttcagtgcatatttccaaattcattaaacagaatgaaatcaatgntattaaatggctatatcataatattcaagcntattatggaatntataccacagngggattcacgtnaatacta

SEQ ID NO: 973 - DNA, 288 bp, Homo sapiens
aaatataaatttccatatgatttattgttgttccttgtacataagaaacagtaatatacaacttacactgctttagaatgtaaaatggataaaaatgtgtacaaaaaaaagcacattcctagaaaaaggtattggcaaatagtaaaaatgggaggtcaaaagcaaaaaaaaaaaaaaaaaaacaaaacaaaaaaaagaaaaaaccaacaattcttcaattcagtgtgcaaacattatataaaaatagaaatactaactctacaggcagtatttcctgataaattattt

SEQ ID NO: 974 - DNA, 524 bp, Homo sapiens
aaaaaaacctaacccacctttcttacccagtcttctataatgtgcctaccaaaaagcctagtcctagcccatctgcctcaactcctctcccttttaggttgtagggaagaggccggagtgtagagtatattatatcttctgtcccccttatgccaacaagatggccttcccctctgaaacaaagtaaaactgcaacactgtgacttcttaaatgagggatatgtgaaaaggctatgaaaaatacaaaggctttcctaggaaatgtgttataatgcagcgggaagctaattcttgaaatatgcacattatagttactcagtctcacatactctagttactggcaaagaagttactgagaatatgtcattcaaaggcataggggcctttgaatggaacaaatgctttcacatcatttgaaggtatagacaatggaattgtgagtagcttaatctctatgtttctctccattttcattcctcctgcaactattttccttgatgttgtaataaaatgaagttacgatg

SEQ ID NO: 975 - DNA, 230 bp, Homo sapiens
gtccagtgaagagggttggagactgttcaagatcgacaaggagtacttgctaaaaatggcaacagaggagtgaggagtgctgctgtagatgacaacctccattctattttagaataaattcccaacttctcttgctttctatgctgtttgtagtgaaataatagaatgagcacccattccaaagctttattaccagtggcgttgttgcatgtttgaaatgaggtctgttt

SEQ ID NO: 976 - DNA, 156 bp, Homo sapiens
cgctccgtgggaaaaaacagctcctccatttccttgaaaactgaacgattattaaaaatagattaaacttcgctggaaatgagtagccaggaagttcaggggagggtgccgggtccttcccgggcctggcgtgtcggagccacccaggtcccgcag

SEQ ID NO: 977 - DNA, 482 bp, Homo sapiens
  misc_feature 477: n = A,T,C or G
aaatgtctgtgactggcagtgattctttttcttaaaaatctattaaatttgatgtcaaattagggagaaagatagttactcatcttgggctcttgtgccaatagcccttgtatgtatgtacttagagttttccaagtatgttctaagcacagaagtttctaaatgggaccaaaattcagacttgagtatgttctttgaataccttaagaagttacaattagccgggcatggtggcccgtgcctgtagtcccagctacttgagaggctgaggcaggagaatcacttcaacccaggaggtggaggttacagtgagcagagatcgtgccactgcactccagcctgggtgacaagagagacttgtctccaaaaaaaagttacacctaggtgtgaattttggcacaaaggagtgacaaacttatagttaaaagctgaataacttcagtgtggtataaaacgtggtttttaggctatgtttgngattg

SEQ ID NO: 978 - DNA, 298 bp, Homo sapiens
aaagtatatctagggttatttttaatgttttatacttttatattctctataaaataacctatagttaagaaaacataccattctctcaaagcaaaataaaacaaagctttctttaatctgaaactaaagatgagctttccatttcttgtcaggatctgtgttgctaaatatttttccttctttttctagttttttcaaatgaagtaagagattatgcttagccatttcatgtaaattctcaggagtattcttgtaaataatttttacaagctccattactgtaaatgatttctcaaag

SEQ ID NO: 979 - DNA, 280 bp, Homo sapiens
ctggcccctccgcttctcaactgtggctcatgtggctttgttagagtcttgggggtgaaaggtgtgagagacaggagggagcgtggctcaagtggggccattcagtcgggcggccgggtgtcgggggccttctcctggacttcatcatactgcggtggaggagtcaaaggctctatcgagggaggagggacgtttttgtctgggaggttgatcctaaagtctttgaggtgaagcttttcagatttaatccttcgaactttcagcggtttcagtcgtttgg

SEQ ID NO: 980 - DNA, 445 bp, Homo sapiens
ctgccatcacccccatgtgcttggcttgatcttggatgttctgtggtacaccttggatgttggacaggagggtgtggcacgtggtctggagctgctgagtcaggttgcgggcaattgcaagagtacgtgactcaatgtgctcagcacagtgggactgcatttcatgcaagaattctacaaactaataagattcttgtgttttactttttgcgatgtcttctggcttttgtgagctgtatttgtgaactttacttttacaaggctgtgtgcaagaagtttgggttgcacgtgagtcgaatgatgctagccttcttggttctcagcactggcatgttttgctcatcatcagcattccttcctagtagcttctgtatgtacactacgttgatagccatgactggatggtatatggacaagacttccattgctgtgctgggagtagcag

SEQ ID NO: 981 - DNA, 222 bp, Homo sapiens
  misc_feature 174, 182, 184, 188, 215, 218: n = A,T,C or G
ccaacatggtgaaaccccgtctctactaaaaatacaaaaattagctggatgtggtggcacacacctgtagtcccagctagtcaagaggctgaggccagagaatcgcttgaacctgggaggtggaggttgcattgagccaagatcacgccactgcattccagcctggtgacagancgagactnantctnaaaaaaaaaaaaaaaaaatttttcttnctnaatt

SEQ ID NO: 982 - DNA, 275 bp, Homo sapiens
ctgtcctctgttactcagatacagttccaaaactaagcgattatataagcacatccatattttagggctactctaagttaaaaaccttttctcttgtttcagagttatttacatcaaattaagacatttacaaattgttcatagtatacaatagcccaaatatgattttcacctatgctgtgtaaagaagttaagcattcgtaagtttgtctaataaattcagtgcacttttttccataacacgagctattctaaatgttttacatttctttcag

SEQ ID NO: 983 - DNA, 415 bp, Homo sapiens
  misc_feature 61: n = A,T,C or G
aaaaagattaaacaatcaggctagcaaaaaggtactcaatacatattttccttatatcaancaagctaatttcagtacaatataactatacagaatatatacaatacacatgttcacaaagcaaacactataggctcagaacagatttgaaaaaacatgatattcacattgattacaataaccctaaaaatgattgtaacgttgaaacggcacttagtttacaaaaaaggtcacaaaaatatatatatatatgtagtcaccaagaactatggttcctgtaaaatactaatagccagatactagtatataaaatgtgaagttctgatattgtatacattttttggaaataaaacaaaatccaaaaccatttttgttattgtcaaaagtcaaacatgccaagttaacttagctatgg

SEQ ID NO: 984 - DNA, 213 bp, Homo sapiens
ctgtcccttcccgtccagggtgtgagggctcgggacctgggtggatgtgctgtatctgggcctccaggccccagccccaccgtcactgggctgaacccgtagcggcctgtacccagagaatggtgcgggtccggctatcctcccacgagaacaggggctcatagccgaaatggcgctgagccttgtcggtgctgacggtgaaggtggtgttgg

SEQ ID NO: 985 - DNA, 455 bp, Homo sapiens
ccagtgggtggcactaaaatacatttgaggcttgttttaactgtttgttttctcaaggcagaaaaacaccagtagtttcagtctcattgccctaatatggaattccatattttattagagattacagagtaaatagtttcttaaggtccattttttttttttatcatcactgatgtctgtctccattccctgctccactttgagtatctttctgcgactttttcccacaacctacaaaggtcctgcaagggtaccagaccctcttaactgtggcacagaattgtggtgtgaaacacatgatggcaaacaagaacattttgcttcttaacaataccccatgtttaatgctctggggcagctttttctttgaagcagcagcagaaattcaattttcctagcttgttcaaatatcttatttaatattagagtcacaaattacacattttgttatattt

SEQ ID NO: 986 - DNA, 238 bp, Homo sapiens
aaaaaatatacaggctttttatatgcttggatctgaaaaaggtaacatccacaatgacattctattacagagttcttacaatcaccctagcctactacactctggtataatactctttcttcaattctgtttaacagaataaaagtaaccaaaggttaaagcaatgcatttgaacttaaaatataacctgtccacaggaattaagtagttttattcccactccctattacataatttc

SEQ ID NO: 987 - DNA, 270 bp, Homo sapiens
  misc_feature 231, 235, 237, 245, 255, 256, 260: n = A,T,C or G
aaagaattactctcaaagacattgcaacaactccaaagtccagggatcttataagactaatttattagtaacaacatttacaaagatagctttttaatgctgagttgtatctgatttaatgcagtcagaaagaaaaaagaaacatttatctcattttgctgatctgtcagattttgcttaagttaggagagcctgcaatttcaagcccagataactggaattccatgaatnaacncngaaagacnggagaaaggnnaggnagttcaaaaa

SEQ ID NO: 988 - DNA, 135 bp, Homo sapiens
ctgctgggtgagctcggagaggaacccgtccggcacggaggcgcggggcacgttggtgtttacgatgaacatcggcatgatggcagaaggaccaggagacccgcgcagaggcacagacgcacgcgccgcggccgc

SEQ ID NO: 989 - DNA, 329 bp, Homo sapiens
aaaaataaatatgtactacggaatatcccgaaaaactgcactagagacaaagacgtgatgttaatatcttttccccacaattattacggataaacagtagcaccaataaataaatgataacaaatattaaaattaaaaaaggagagagatttagtatgtagaattctctattttttcttgttttgtttttacatataaaaaacagaatagcaatgtctattttatcagaatcacatatatacataaacatatatatatatatacacacaaatacaagttgccaaatatatatatagtatgtagatgtatattgaaaccttatttcaaag

SEQ ID NO: 990 - DNA, 415 bp, Homo sapiens
cgacattgaagatttgcagccggaaagtttatatggattagctaaacaatttacaatcctagacagtaagcagtttataaaatactacaattacttctttgtgagttatgacagcagtgtaacatgtgataagacatgtaaggcctttcagatttgtgcaattatgaatcttgataatatttcctatgcagattgcctcaaacagctttatataaagcacaattactagtatttcacagtttttgctaatagaaaatgctgattctgattctgagatcaatttgtgggaattttacataaatctttgttaattactgagtgggtaagtagacttcctgtctttgctttctttttttttttctttttgatgccttaatgtagatatctttatcattctgaattgtattatatattt

SEQ ID NO: 991 - DNA, 251 bp, Homo sapiens; identical to SEQ ID NO: 507

SEQ ID NO: 992 - DNA, 593 bp, Homo sapiens
ttggaaacagtactacctacctagaggttatgtgttttctctttctccccgctttcacctctttctttcccaattcaaaacagccaagtgagccctgttctggtattttgaatcattagagaaaagaaagggagtggctgttttgagttgtcctttctttgcagaaaggagaaaatgtgattgtgttttttttttaccagcctacttctaagtgtcactgcctggtttttctctttttcaaggattagaactaagaggacacaccagcatcggagtgtattaagcccctgaaacacatggtagctagggactgaacacaggaaccgtatgacagcagcacaaacccccaaaggatgttcctgccttgtgggcccctgagccccttgggagactgagaatcatgaccagattcatccagaactgctgcagtgttaagtgaaaatcctctgtagttgttctgcagaggaaccttccttccattagaaaatttctgctcaatacagaatggtccacatcacccaaagtgcactgttggagatgctgtgaaattaaaacctctttgtacctgagacatctagattcacctcaggagg

SEQ ID NO: 993 - DNA, 564 bp, Homo sapiens
  misc_feature 507, 521: n = A,T,C or G
ctggatgaccagagtgctgaaacccacagccacaagcagtccagattatataagcggaaagctaatgatgagagcaatgagcattccgatgtgattgatagtcaggaactttccaaagtcagccgtgaattccacagccatgaatttcacagccatgaagatatgctggttgtagaccccaaaagtaaggaagaagataaacacctgaaatttcgtatttctcatgaattagatagtgcatcttctgaggtcaattaaaaggagaaaaaatacaatttctcactttgcatttagtcaaaagaaaaaatgctttatagcaaaatgaaagagaacatgaaatgcttctttctcagtttattggttgaatgtgtatctatttgagtctggaaataactgatgtgtttgataattagtttagtttgtggcttcatggaaactccctgtaaactaaaagcttcagggttatgtctatgttcattctatagaagaaatgcaaactatcactgnattttaatatttgntattctctcatgaatagaaatttatgtagaagcaaacaaaata

SEQ ID NO: 994 - DNA, 500 bp, Homo sapiens
tgcctcctttcctcccaataaaagcatcatagctcagagctacaagctccttgaatggagaaaacccaaatcacccaggaaaggtgacacaactcctgatgtgcagtatcaagtgtgaatgctggaaatgctacttaaaacgttgaccaggaatggcctggaggttgccttcaacttgagtaaatcacacagacctctgagatttatcctaccctcattcctagaacaaaaaaaaagtacatttaagaaatcctcactcattactatcactgtattcctcactctcttacaatatactgaggaaaaaaaagatttctccttaacctcctactaaaaattaaattaaggggaccctataaacaagtcaggcagccaacatgataagggcaattttggcaaaatatgactgggctgagtagagaggtatctcagagacagctagcatctttgttggtcaaaccctagtatgaataattcagtgctcttcatcagatgaaagg

SEQ ID NO: 995 - DNA, 370 bp, Homo sapiens
cctcctgtcctccgtgcggctgggcaccagcaccagggagtttctatggcaaccttagtgattattaaggaacactgtcagttttatgaacatatgctcaaatgaaattctactttaggaggaaaggattggaacagcatgtcacaaggctgttaattaacagagagaccttattggatggagatcacatctgttaaatagaatacctcaactctacgttgttttcttggagataaataatagtttcaagtttttgtttgtttgttttacctaattacctgaaagcaaataccaaaggctgatgtctgtatatggggcaaagggtcagtatatttttcagtgttttttttctaccagctattttgcattt

SEQ ID NO: 996 - DNA, 560 bp, Homo sapiens
  misc_feature 471: n = A,T,C or G
aaaccaaactgaggcataaagcagaaagagcaaagacacatgaatacccttcttaacaatctcttctacttatgcctccaccgtaacctttgtacttgttttcctcctggggaaagtgtcagaacagtgcaaggactggtgggtaacctggcctcttaacctttttaatagcaagcaacatacagaagtaatgcaatcaacttgtatttcccttgattttattggtctgaattcattttaggttactttaacattttaatttcctgtaactgtacatgagagaatataatcacctaagagaatactgaaccagagtcagccaaatgtatcactgaccctcaattatgttttaattggtcctaaaggaatgtaccaccccaacagtttgggagttgggcaaacagaattctttgggggagggaagaaaaaggctataaaacagccaaatgtactcaacatcattaaaacggntctttgtttttcacccctgaatgatacttctttactacactatatgcacagaaatcctaacagaatcttggttgccagtattatttaag

SEQ ID NO: 997 - DNA, 267 bp, Homo sapiens
cattttggtggtggcaagacaactggctttggcatgatttatgattccctggattatgcaaagaaaaatgaacccaaacatagacttgcaagacatggcctgtatgagaagaaaaagacctcaagaaagcaacgaaaggaacgcaagaacagaatgaagaaagtcagggggactgcaaaggccaatgttggtgctggcaaaaagaagtgagctggagattggatcacagccgaaggagtaaaggtgctgcaatgatgttagctgtgg

SEQ ID NO: 998 - DNA, 191 bp, Homo sapiens
ccacgaaaatcaatgagaagccacaggtgatcgcggactatgagagcggacgggccatacccaataaccaggtgcttggcaaaatcgagcgggccattggcctcaagctccggggaaaggacattggaaagcccatcgagaaggggcctagggcgaaatgaacacaaagcctcgaaatcagtgcgctccag

SEQ ID NO: 999 - DNA, 421 bp, Homo sapiens
ccacactccgcagctaggggctgccaaccccgctgggtgtgcacacactcctctcaagagctgccattttatgtgtctcttgcactacacctctgttgtgaggactaccattttggagaaggttctgtttgtctcttttcattctctgcccaggttttgggatcgcaaagggattgttcttataaaagtggcataaataaatgcatcatttttaggagtatagacagatatatcttattgtggggaggggaaagaaatccatctgctcatgaagcacttctgaaaatatgggtgattgcctgaatgtcgaagactctacttttgtctataaaacactatataaatgaattttaataaatttttgcttcagcacttggccccattgtagattgccctgtgcagtaaactttcaaggtgtcag

SEQ ID NO: 1000 - DNA, 217 bp, Homo sapiens
aaatcaaggttcataggaaaagacataaatgaggaaactccaaacctcctgttagctgttatttctatttttgtagaagtaggaagtgaaaataggtatacagtggattaattaaatgcagcgaaccaatatttgtagaagggttatattttactactgtggaaaaatatttaagatagttttgccagaacagtttgtacagacgtatgcttatttt

SEQ ID NO: 1001 - DNA, 592 bp, Homo sapiens
gtcaacttaactctcagatagtgttgccatcaagaaagcatgcaacatcattggtttctaatgattttatggcttgtgacaatattttatctggactgacatgcctctgctgcttttgctttgtacttcattgctggtaataaaatttcagatggaaaacttacaaaatatatacttaattagaagaaaaaaatagagaaagggctattagaattaaaaaaatttgaaagtaacttaatctaacatttatggcacagtttggacatatccataattttttttgggaacacacatttctgattttttttttcccccttaaagaagaaagtctcaattccattgattttcaattcttagccactggctcattgctttgagcaatgcttgattgattctatttatattatatgatattgggctgataaaataccagttcaatgatgagttttcttaacagaatttggtttgtacttgcagtggctgaacaaagagcatggcttgagaatcaaagggatctgcatttagcaatgtgatgtcagtaaatggacataacaggattgttgtaaaggttgggcatgatgtatgcaaagta

SEQ ID NO: 1002 - DNA, 330 bp, Homo sapiens
  misc_feature 67, 109: n = A,T,C or G
ttttttttttttttttgtttttttttttttttttgctctgaaatactgaagtatttattggtcttanagtattctcaggaaggtgacagtgaggggtttttcaaagaanaccagaggataaaaggctcaatgaaaggataatctccatatcagtgctatcaaagtgtcaacatttattcattaatttctatttgttggaaactttactaaggaatgactgctttaaggtaacggataaggacagagcttgaagggtcagcaattcagtcagccactggggtagttttcacatgaagtgagaagaaaagctgtgacggagtttgtagggca

SEQ ID NO: 1003 - DNA, 502 bp, Homo sapiens
aaacatgtcttcattgtagtaaaagtatcatatttataaaaaatacatatgcatttaatgtgatattccttatagtcaaaatcttgatatcatcctgttaatctggctaaaaatgtatctgtaaaatgaaagagaggaatattttgccattccctaaacaacagttgtttgaagcttttgtaattgctggttatgggaatttaccaataacaggaatgaatttggattttcttttgctggaatcaaatggacaatgtcataattagctaaataatgttgaggctaaatgaagtttgagttttaggcacatcctttatggaatataaacaggaacctaaaagttcattctgaacataggttgtttctttctgccaaaacaagattaatagtcagtaccctaacgacaaggtcctatcactgaagtagattatcggctagtcaaatgggttcctaacagcacctccctcatgggttaaaacaagagggttaatgtgatgtgtat

SEQ ID NO: 1004 - DNA, 529 bp, Homo sapiens
caagataaaagatttattcacaccacaaaaagataatcacaacaaaatatacactaacttaaaaaacaaaagattatagtgacataaaatgttatattctctttttaagtgggtaaaagtattttgtttgcttctacataaatttctattcatgagagaataacaaatattaaaatacagtgatagtttgcatttcttctatagaatgaacatagacataaccctgaagcttttagtttacagggagtttccatgaagccacaaactaaactaattatcaaacacatcagttatttccagactcaaatagatacacattcaaccaataaactgagaaagaagcatttcatgttctctttcattttgctataaagcattttttcttttgactaaatgcaaagtgagaaattgtattttttctccttttaattgacctcagaagatgcactatctaattcatgagaaatacgaaatttcaggtgtttatcttcttccttacttttggggtctacaaccagcatatcttcat

SEQ ID NO: 1005 - DNA, 539 bp, Homo sapiens
ctgtgcagttatatgaccataaaggaaatgaaccattaaaaatggatctacagccatatattctgccgttactcaaaggcttaatgatttattttccccctccagccctgcctttaccaggttaaatgacagaagaccttctattgtacctattgttcaaaaaatattactgttctgtggaacctgggagagtccaattgataagagaaactgaatcatactgatgaggtgaaggaaaggtctgccggtgtggggcagggcactctttctcagcagccaagataacttgtcacacacgaagcagagagaatgcacccgatgaaaatctctctgaactgtgttccttgaaggatctcttaaaaaaaaaaaaatctgaaacatcatccattgaacaaatgaaaggcttatacctttaccatgaagaaacattgaaaaccaccgccacactaggacattactgagatactaaaatatctgtccatcatactctcatttggaataaatagtttccttttttctttaatactgctaggattgcc

SEQ ID NO: 1006 - DNA, 436 bp, Homo sapiens
aaaaattacttaatataaatagttggcagcaaactattccattacagagttaaattaccagtacaacagacagactggagatttagacacctggaagataacaataaaataaactaaaatatttaacgaaaaatttaagctgaaggtgtttacctagtgtccataaaagcatgggttctctttttatttagaaaaaaataaaaaacggctttaacaccccattaggaatataaaataaaatcaactgaaaatattaatttgcatatcaaagaaccatttataattacaatccaaacactccataaaccacttgtgcgattctatacagaaactgggaattagaaactagttgctttaatattacaaagatttcagctccaaaaataattcaacataaaataaactttagcaattagtgtcataaaattatatattt

SEQ ID NO: 1007 - DNA, 346 bp, Homo sapiens
cttgcagaaaatgaatgaatacctttgttcaataaaggaaatatgcactgctcacttttttgaaggaaatgccaaagttacgttttacaacaaggctagagtttgtaaattctgggttcatttgtgatgacataagtcagcaaactgcgggaatactgtctcttctatgtattttgtgaatagtaagcataattttagttttgtattatcaatgaaaatttcacttgaaattaaagctgccttttgttatatttttaacctataggataagattccagtattgtatatgagttttaacaaattaaaaaatcaaatcatgtacatttgaaaatatttgcacacattt

SEQ ID NO: 1008 - DNA, 529 bp, Homo sapiens
ccaccccgggcctaggctgggccgggcctgtagaaggtactcaggaactgcaggttttgcgtttcccctccatgaaactgacaggcattcgggctgacttctgcctctcagtctcgcggtaagagacccaagtttttctagtcctagatggaaataaatttcatctgcctcaggtctctggtataaaaggtgcgatcccagttacctcacaggcctaggcgaggaaaatgccaagagctgtaaaagggcttggaaaagtcaaaaaggtgatgtataaatgtaataattgattatcattttgtgctcaagaataagcaatggaaaagaaaataggaaagtaagtctacagccctaaaatatatgcatataaaactttaaaagaatgcggttccaactctacagatggtatgtggggattgtctactgctttatagtctcaatgccccttttctcacctccacaaaatccacctgggagagttaactgtacaagaggcccaaattcagtcacccccaccccgccctcccag

SEQ ID NO: 1009 - DNA, 567 bp, Homo sapiens
  misc_feature 536: n = A,T,C or G
aaacaatagtaagtagcctttaatacattacatgtgctcattgtataatatatacacaatgaacataattacatttgtacacaaactaagtaccggatttggaaacctgcttattgctgtacacatgtattccaatgaaatataagcccagtacttcaaaatacctacactttgtttttttttttttaagaaaagataagcagtaacatttgtgtttaagctgacaggagtgtggcagtaactgctgacattgcaatctgaccgagaaagaattatagcagaaaacaggacatacttcacttagcaataaaatggcacattttaaatacatatatataaaatttttacaaatcaagtgtgaaacaaaagcactgcagtagctaaaatgggaagaaaaaaagaaaacaagcttcaatggaaataataactaactttagaaaatgaaaagcaaaaaaatatatatataaattcacctagacttaagaaacatcgaaatctggaaatcagcaactaagtaagctctggaaatagactgnacattaaaaagcacctttacttatgtgctct

SEQ ID NO: 1010 - DNA, 555 bp, Homo sapiens
aaaaatggagagacaatggcaaattgtaccttatgtccttatagaacccaaaggatcattctgagtaaatgtgaaataaataaagtgatccatgagtaaatacaatctctgggctaacttaaacctagaagagtgagccaagtgagcactaacaataccacttagaaatgtctagaaacatcatttctagaactcagcttgggagaccatatcttgcctgaatatgtacatatatttacaaaatattcccttttggcctctggaatttagccattttagtttggctgttagctgttttctttccatatgctagccaatactgcagttataactatcattaaaatactcttatgcatgaattacaaatattaataaagtaactctgcatgtataaatatctcaataattctagcagaacttaaagcattcagaatgtacataaaagtatttgtttttggtagggacagtatttctttttatatcatcgctgtttcaataatgctttgtacatagcaaagcccaaaactgcaaaaacagtagcaccaaaacttgctc

SEQ ID NO: 1011 - DNA, 547 bp, Homo sapiens
  misc_feature 456: n = A,T,C or G
ctttatttcattcacttcctccttacaaggtgaaatttcaatctgtacaggttgcgtctgccagttcagtccacagctcagagtatcaccttgtcctcattccatggtataagctgttgcggggggacaggtctgcgggtcgtggattcactggactggatgggacatgatccagaactccgctccgtttggcttcccaaggatcccaccaactcattctaatcagtgatcactgaggaaatgcattgtattcctattcactatttcaaagatcaggcctacctcattggtatattaagaaagttttctcaagtatatttagtgtttatcattttactatagttcttcaaatgtctgacattcatcttttccctacctctaaattcctttctttttcacattatctttcttgattgctttttaatagaaaaacaaacaaagacatggatttactgngcatattagcagatccatactggaaaatgcatggaggtttcatatacaccacttacagtaagtaataactcagagtataaagtcgaaaaga

SEQ ID NO: 1012 - DNA, 511 bp, Homo sapiens
  misc_feature 405, 495: n = A,T,C or G
aaaatcaagatagagcattccttcttgtatcagtggggcagtgttaccataaacacggtgtatatgttgttaaaccctatgaagagtaacagtgtagaccagactgcctctctcagatatgtgcctgatattttgtggatacctcccctgcactggcaaaacactatgcttttgggtgttagactgaaatattttaagagtatttaacctttccagtattctgtttcacgcttagatggaaatgtatcttatgaatagagacatattaaaataatgtttacatcttagaaaaaacatagatagtgctagtaatattacttataactgtaatatatagattcagaaatacattttcattatccaaaatcagcttcaacaaatggtttctggagacaaataatttgntttcattatcattgtataatcaggttaatgatttattttttgactaaatgtgcaatttcttatcactagataactttcagtatcagtggngggtacttattactta

SEQ ID NO: 1013 - DNA, 212 bp, Homo sapiens
ccacacctgtcaggctacacaagcagcaaggaccccctgagacctgaacatcagatgtctggctggaggcttcagcaggtcttcaacgccatggccggcagttcctcaaagctaaagctggtgcgtgaatgagctgatcatgatgacagctttataacatgcacctgacagatggcacgttgacagtgaggggagcttctctgggctgggac

SEQ ID NO: 1014 - DNA, 331 bp, Homo sapiens
aaatccttgagcaatctgtatacaattaagagatttctgacatttattcttacactaaatggatcaactctaggatttaggcatgttaacttctgttgtgttttgaatctctccagagttgcatgtagatagcatttatttctgtgcccttaaacccatttagaaaataactacaaagtaaaaatgtagaggaaatagaaatgtattttttcatgaacattttgatacaaatttcatcatttaatgattcaccaatttcttgcattaatttgaatttaagcatttaattcaaagagaggggagcatccattattgatacatgtgggctttt

SEQ ID NO: 1015 - DNA, 374 bp, Homo sapiens
aaagaaccatctactaatttctaaccatatattatttttaataatggtcttaaaatttctttttctatagacaccaaatctggctgaatgaaataaattggtgataagtggaaaaaagagaaaaaccaatgattcataacaatgtatgtgaaagtgtaaaatagaatgttactttggaatgactataaacattaaaagaagactggaagcatacaactttgtacatttgtgggggaaaactattaattttttgcaaatggaaagatcaacagactatataatgatacatgactgacacttgtacactaggtaataaaactgattcatacagtctaatgatatcaccgctgttagggttttataaaactgcattt

SEQ ID NO: 1016 - DNA, 361 bp, Homo sapiens
aaagatcaataagaaatggattttggacattaaaaagatcaagtcactgaattaaacagtagcaacccccattaatctagaatcccatagtgctgaaggtagaggtgtctgtgcaaagctagtcatttgttaacagcaatcagaagagatgggggcaggcacacctgtcagaggtggcagcagagctggcaggacaggacggctgggctggtctggtcaggtgagcatgtcccagagacagcagcaacagagagccgtccagcaggctgtgaggcaggtggatggtcctagctcatctcttctttggtcttctaccacatacactgtggttttaggaggctcctgaggtccaccctgccag

SEQ ID NO: 1017 - DNA, 558 bp, Homo sapiens
aaagagacaccagtaggataaaaaccattttataaaagaaacagtaatctttttctttgctccttctggttcctgctgcaattctgtctggctctctcacgcttaacacaaaggcagatgaaagtcagaatacctctttatcattggttgcaagtattgcctttcttcttcctttttgatgtgaaagcagtgcatttcataatcctttgaactggacccatagctaccgccagggctcccacctgcttcagagactgagagtagtcctggatctttttatttttgttatttattccatcagttccttcattcatatcaatcattcagcaagggcttatatttttcctcgtctcttattacattcttttccccttatctgcccttgcaaatgaaattccagatggcaaaaagtgcagaaatggaggaaatccgaagttaagaaaataacaatacaagaggaatactgctgcaatgagagtcattaggtctttatgtttgaatgcaagtgcattgagaatcttccaaataaattccatgtagagtggaactaaataatgg

SEQ ID NO: 1018 - DNA, 439 bp, Homo sapiens
cggccgaggtaaaaaatgtataatttattatatatgtatgtattccttaacaatatgttgtataacccaacaatgaaatatacatcaatgaaaatgacagctataaaacaataaaacttgtgaattctagagacatgttgagtgaaaaaaaccaaatccttagactacatagagtatgatacaatttttttgaagttcaaaaagaaagaaaactataaaataagtcactttagggatacatatgtattttaggtctttctacattcgaacaaatctattaaaaagagagcgggggggtcggcaaagataggagaagagctcaaatagataaaatacaagcactcataatgttattcttaagttaggtgatgagttattatgcttgataatttatttgcattccccatttacccttttataagcatcaaatattacattt

SEQ ID NO: 1019 - DNA, 405 bp, Homo sapiens
aaaataaaataattgggaaagaaggtgggtcatgtattaatcagtgaacagagatttacctaaccaacagacttggattgtcttttgacataatcaaaatgcaacacatgcactttgtgtgtctcctcttaattgaagggagggctgagggatgttttctcttcttgtcttgtgtataattctctattgcttaggatattaaagtagagcactcaagtgtgggtttctgtgttattgaggatttgtttggaattcaaattacagttatgtactggatgctacagacttataacagcatagtgaatggtaagactagtgcaaaacagttatttctgaaaattaaagaccattattgctaccaaatcaatgtgactatttcatatgcattttgcctttgttaatttt

SEQ ID NO: 1020 - DNA, 277 bp, Homo sapiens; identical to SEQ ID NO: 453

SEQ ID NO: 1021 - DNA, 381 bp, Homo sapiens
aaaacttgtaaatagttggccttacaaaattacaacacactgtaaataaatccttcccacattttatacaaactacatgattttgatatacaaagattctgtttttattacactgacaatgtacaacaaagactatttacaatgcaaaaagtatataaaccacaatttaacagtctgctactggcagccactatagtttaggaggtagctttaattaaacgaaatgaacagaagccacatttcccaacttgtgttctaaaaataatttacataagataaaaattcattatatgcacagtatgtacagtttaattattaaactgcaatctagctggatttttttagtatattcagaataactaatatggcagtgggtttgct

SEQ ID NO: 1022 - DNA, 422 bp, Homo sapiens
aaaatgattgctatttttatgtctgcatcaaaaactaatacaaaaaataatttgactaaagtgaaaatttcaaataagtccactggcagatgaaaataaagcaaaaaattacaatagattcctcatcttctacagtagttggtttcaaacgtgtacaaagtaaactctatactatgagaagatgaaatcatcttagaagttagtttttaagatcagtcttaaagatatttcagaacatactagaatatgatctaattattctttcagttgtttacagaaaaatgaaaccacagaattattcctgttacctgggttgaagatcctaataactaggtgtaaatttggataaggtacagtaattcgaaataagtagtgcatgaagttttaatgtctggtttctctataaagcataaatagatttt

SEQ ID NO: 1023 - DNA, 389 bp, Homo sapiens
taggaagaagaggtaatttttactgaaaattagggcaatgttggtcgccttttattaaaagctttttttaagctttcataaagattgctttttgctatttttgaaaatatggtattatagtttgtatggtaactggtcatatatgacagtctactgcatatatatgaatgactaggattaatctggtgtgtttacataggatatacatagttgaaatctagcatgaaaggttaaaaaggagatactgcacaatatttcttaaaagtaaaatgctgttattgtgatgagtctttggtttaacatcacagtattctgtgatgtctttttaactttttggaaagaggtatcatttgtagaaaaaatttgatttgggttaaatataggttttt

SEQ ID NO: 1024 - DNA, 430 bp, Homo sapiens
ttgccggaggccaagtggtggagaaggaaaggaaatgatcgaacgggcatgttgtcaagtgggcatgccactgggaaataccaccagtttaccctgaaacattgtcctcagaggagtaggaaagtggattttgaatctctattttgctcaaaagttcagttcctgagatactgatgactgagagtgctgctgggaaattttcaggattgtgtggtcttttggggttttttgttttttttttttttaagacaaagttgaccgctgttcactgtccacgtgatcagttgtaagattacaatgctgcatgctagttggttacataagatacaattccagtgatggaaggcggttataatggatggtggtgtgtacaagatggcactgccatctttgagcagagcccagctctgcagcgccacttcatcttttt

SEQ ID NO: 1025 - DNA, 415 bp, Homo sapiens
aaaatagtgtggtatttcaaatattgctagagctattttcctgaaatacatttgcaaaataaggctgctttgtaatcaaggaatatttttattgattgaaggaaatgactgtactgcgattcaaaagtaaacttattttattatacagattagttcttaaaaactctatttataccttaacatgaaatccatgaccacaccaaacttggttattcataatttttcctgttaaatataaaacactgtaagttaaaaacagtaatgccaacattgaatttatttttgaggtcaaagaaccagttgttctctttatatttagatgaggatgattgagtccatatactatgtatgtttacatatactatacatgcacattaggtgttttcatttgtgttttgcttatgaaatgtcattt

SEQ ID NO: 1026 - DNA, 559 bp, Homo sapiens
ctggaaaaaattcttaacattatttactgactttaggtatgaactctaccagctagttaacaggaaatacataattaaacattgcctttatcaagtaatgtaaaaaaagggtaagagtaactttgcaacataggacttgaatgagcaactggtgatgatcaaaatctggcacttaattgatttatacttgtacactcacagctaaacgtctctacctgtttttctatggtataaatctaggacactacttatctacataggaagaataataaatattaataatgtgctatgataaacatcctgcactcttccaaatcttacaataaatctgcttcagtttcacttgtttagcttttatatttagtttgttagttgatatatgcttattttaaggaagctgaactactctaacagaatccacataatttttatattagccaaactgcttctttctaactctggttctaatagttataaaaagataatgataaatttatgaagtagatacagtcaaacctgaatttcttaaagtatatacttagaatcggttataattttt

SEQ ID NO: 1027 - DNA, 566 bp, Homo sapiens
  misc_feature 544, 549: n = A,T,C or G
aaaacaaaactcaagaaatctttatctccaccaaagaagaatacagcatttgcatgataatatagttgtggtagcagtagtggaaaaacaagatacagccacatagacagcagtatgtaaaagggaagaaccttgtcaaacccatctcttaatctactttttgtgtcagtgataaggaaggaaaaaggtaaaaatacagtatacttcacgaaacatcatccactcaaaaaagtgtctggaaaaagtacaggagagagaatggaaccattcgcaaatgtgaaaaacacatatatcagcgaaacatatgcagttctcaatgcagttacataggaaatgagttttgaaatgatctgattctcatattatctctggtgtattattcaagttgtcagttactgctttttctactcctttcccaattttgtggctaatagactaaataccaccctaataacaaaaaggacaaagtagcccatttaagaaacatgaattaaatttctgagtttatctacatctatggttaatttcaacttttgaatgagtngttgngaatagcctaactccct

SEQ ID NO: 1028 - DNA, 314 bp, Homo sapiens
aaaaggacaccgcctgtaactataaattctagcacttagtcatgatagccatatacttcaacaaaacattttacattaagaaatcataagatatattgaaactattttcacatttgcctacttttcctttttctgctttccttttaattatacaaatgctttatggaataactgtctggagtagacaagaggaaaagtactatgaacataaatacaaaaataaaattctggtatccattaacattctctgttatggagaaacattattgcaaatgtgctaatattttcatcacaaattgtgccagtacatgttt

SEQ ID NO: 1029 - DNA, 417 bp, Homo sapiens
  misc_feature 3, 13, 22: n = A,T,C or G
tgnccttcactgntgcttaatngtgaacagccaaaagctatatgttatggcttattgtgtgaaggtaactaagaagtggtgttccatgacttcagagtacatccatgcggagtccattatttgagtttgacatttaataactttgctggaaaatctgtaaaaaagaaaaacaagtttgctagtgactaagccccgcatatgtgagtgaaagtacttcaggcacgctgcctcctggtaacagctatgcagggagggaggacccacactgctacacttctgatcccctttggttttactacccaaatctaaatagatacttttgataatagataactgctcttttactaagacatagtctctacctatagaaatgtattttgaaaacacttattttacacagcaattttgtatccattt

SEQ ID NO: 1030 - DNA, 111 bp, Homo sapiens
  misc_feature 14, 18, 21, 26: n = A,T,C or G
gaaaatttgatacnaagntgnacatnagtacttgtaaaggcaattaagcttccccagtctatgggaatacaaaagttgccagcaattaatttacattacaaaaaaggaaaa

SEQ ID NO: 1031 - DNA, 249 bp, Homo sapiens
  misc_feature 244: n = A,T,C or G
aaaggcaaagctttattttcatctctcatcttttgtcctccttagcacaatgtaaaaaagaatagtaatatcagaacaggaaggaggaatggcttgctggggagcccatccaggacactgggagcacatagagattcacccatgtttgttgaacttagagtcattctcatgcttttctttataattcacacatatatgcagagaagatatgttcttgttaacattgtatacaacatagccccanatata

SEQ ID NO: 1032 - DNA, 587 bp, Homo sapiens
  misc_feature 81: n = A,T,C or G
ccaggggtctctacaaatttcttagcagattcaatgctatcaaacacaacaaaaattgatcccttaaatgctttatgcaangttcttctcatctgaatatttagtacttgacctttatcttctaaccattcttttatgtcatcaagagttgcatcagttgggaagcctttaatataaacagatctgttttttacatcatttttatactcatcagtcacttcaggtaggggtttgcttggagaccttctgattttagttttatcttcactgatttccatgagttctgccttggatttgctcaatgcttccacaattacattaaagtctgttgttagacggttcaacctgttgaattttatcattatctccaaaggtacccagccttcatccagttttatctgttcctttagaaacttgtcccgtggcaaattgaagtcgccaaaataatactcaatttgatgacagattttggcctccagggcagccatcttttcattatcaccattttcagccattgcggctatctttaaggttccggcccacagaagccgcgccacaggctcacaaacagcaacagcaacgactcc

SEQ ID NO: 1033 - DNA, 354 bp, Homo sapiens
  misc_feature 41, 42, 84, 134, 200, 289, 315, 327: n = A,T,C or G
tgtacaagcttttttttttttttttttttttttttttttgnncaaaacagaaaaaaacaaaacactttattttccacaaggaanagcaataggaaaaattaaatcatttcccacatattgttttcttaaaacanagcctacaaggacatattcagcaccaaataaaaaaggaaaaaaagagaaattacaaacagccatanaatataatctataaagcaaacatttaatattgcactttgttttgctaacattttggattttacttttcctaattgaaaaatcaggaatntatcttgaatactggaatacaactgngaacctcacatnttatgtcaggaattgaccaatattttt

SEQ ID NO: 1034 - DNA, 491 bp, Homo sapiens
  misc_feature 469: n = A,T,C or G
aaaagtttattttacaaccatgtaattgtacaaatgatataaacagaagtcagataaaattattagtacatatatagtactaaagcataaactattacagaaaatttgatacaaagttgtacataagtacttgtaaaggcaattaagcttccccagtctatgggaatacaaaagttgccagcaattaatttacattacaaaaaaggaaaaccattatttatgctatcacaaaagcaatacccttaaaagtaaaaacaatctccacttgatattagtaatttgaaaaacttagcatatctacaactactgcttaatcaacacttttcattgattcaacattatcacttaaatgcagatgcaaaataaccttgcatggcaaacatgtttactctgtgctaatgaaactatgaaacagttcctgcaagttcacagacaagtcaatcaatgattgactacagaacagactggngagtgttacaaaaaaaaaaaag

SEQ ID NO: 1035 - DNA, 325 bp, Homo sapiens
  misc_feature 12: n = A,T,C or G
tggagcattcanacttgtctttcagcaaggactggtctttctatctcttgtactacactgaattcacccccactgaaaaagatgagtatgcctgccgtgtgaaccatgtgactttgtcacagcccaagatagttaagtgggatcgagacatgtaagcagcatcatggaggtttgaagatgccgcatttggattggatgaattccaaattctgcttgcttgctttttaatattgatatgcttatacacttacactttatgcacaaaatgtagggttataataatgttaacatggacatgatcttctttataattctactttgagtg

SEQ ID NO: 1036 - DNA, 415 bp, Homo sapiens
ccatagctaagttaacttggcatgtttgacttttgacaataacaaaaatggttttggattttgttttatttccaaaaaatgtatacaatatcagaacttcacattttatatactagtatctggctattagtattttacaggaaccatagttcttggtgactacatatatatatatatttttgtgaccttttttgtaaactaagtgccgtttcaacgttacaatcatttttagggttattgtaatcaatgtgaatatcatgttttttcaaatctgttctgagcctatagtgtttgctttgtgaacatgtgtattgtatatattctgtatagttatattgtactgaaattagcttgtttgatataaggaaaatatgtattgagtacctttttgctagcctgattgtttaatcttttt

SEQ ID NO: 1037 - DNA, 310 bp, Homo sapiens
aaagtggcaatacagattttacttaatggacttaagttataattagaaaccagttttatatacagaaaatccataaatatagaacttttattcctattttatctttaggctatgcaaaaaatggactaaaaatttttcatttgggtctttgtaataaacatgtaaatacatatttacaatggagatgcttcctgatagaaagtaaacagaagtaattttggtcttcactagaatccatcatatctattttcgaagatgatgtaatacatcatgtttactcaaaatttgattccttttatacacataattt

SEQ ID NO: 1038 - DNA, 307 bp, Homo sapiens
ctgctgtgtggtggtcaggggactgagttcaacaggtccttcaggaagctctctggatcggtgatttctgataaaagaccggccacatcgaggaactctgagaaggtctccactggcatgaactcctcctggaaggttttcagggctttgtcggcagcttcgtagatgggcatgtcgttgtggcggatgtactcagcgagagagcaggaccagcctccctctgtgttactggtaggcaccttcttaaacatgttgtaaatgagatcgacgagggcccaaaagagaagggaagaacggtaagcggaat

SEQ ID NO: 1039 - DNA, 598 bp, Homo sapiens
aaatttctctctataacatttcaattgagacataaaacacactttatacaacatgcctcactattttattaacagcatgacttccctttccccaatccccaaaccatgttcccatctacaccgcaccccacccaactctcacctcttccattagcattattacaaacatattttacaaatcttataccaagcttttccactgtctcttttcaatgtagaaatatcttatatataaacccaaataccacaaatcttcacatttatattttctaaagcagttaaacctttatagacaattctacctaaaaagccaaatgtgcttgacaatatgtcatgttatgttaagttgaccagacacagaagtcatttctgtcggatttcttgtcgatgtttgcattaagttggagctttctgatctcggctcttcttgtgccagtaatttgaaaggtcacctctctgttggcctttggtttatgcaatgcagtctggcattgcataattaaaagtctcggccgggcacggtggctcacgcctgtaatcccagcactttcggaggccgaggcgggcggatcccaaggtcaggagatccagaccatcc

SEQ ID NO: 1040 - DNA, 434 bp, Homo sapiens
ccaggcagattcagcctctctctcagcctccctgcttgctgactggctcgaaggccatggcatgaaccctgccgatattgagtccctgcagcgtgagatccagatggactccccaatgctgctggctgacctgcctgacctccaggacccctgaggcccccagcctgtgccttgctgccacagtagacctagttccaggatccatgggagcattctcaaaggctttagccctggacccagcaggtgaggctcggcttggattattctgcaggttcatctcagacccacctttcagccttaagcagccacctgagccaccaccgagccatggcaggatcgggagaccccaactccccctgaacaatccttttcagtattatatttttattattattatgttattattacactgtctttttgccatcaaaatgagg

SEQ ID NO: 1041 - DNA, 378 bp, Homo sapiens
aaaacaaaatattaacttatattacatgtgtatctatctattgtcagtcgtctctcagttcttgaggtatattattttaatcattccatgccttaatatgcttgcaatacaagaatatcttcagatgggtgaataccaaaaggctttcagtttttagtcagaaatcaagcattgggctgtggtagccaaaaaccataggttagctaaaaagatcatgatacaattattttattaagtcatggttaataacaaatgaatccagacttgtctaacagattttccatcaacaaatattgttatgtgcaaaagtattgcctatgttgttttacacaccactgcattaactagaactgctgagaggactgtatatatgatttt

SEQ ID NO: 1042 - DNA, 416 bp, Homo sapiens
ctggctggccgtccgcctgagcccatggatgctttctcaatcctaggctggttactgtgtaagcgttttggagtacggggccttgagcgggtgggagctgtgtgttgaagtacagagggaggttggggtgggtcagagccgagttaagagattttctttgttgctggaccccttcttgaaggtagacgtcccccacccggagagacgtcgcgctgtggcctgaagtggcgcaagcttgctttgtaaatatctgtggtcccgatgtagtgcccagaacgtttgtgcgaggcagctctgcgcccgggttccagcccgagcctcgccgggtcgcgtcttcggagtgcttgtgacagtccttgcccagtatctagtccccgtcgccccgtgcaggagacgtaggtaggacgtcgtgtcag

SEQ ID NO: 1043 - DNA, 231 bp, Homo sapiens
aaatgtccgtgttaagaattggcccactggtaccaactcacctctattttgtcagttcatagttgaagattttgttttatttcaaaaacaaagtacatttttgaaataatgtttcagaataaaataatctcacttttaagtgatccattttttttgtacaagctttttttttttttttttttttttttttttttatttttttttttttttttttttttttttttttttttt

SEQ ID NO: 1044 - DNA, 608 bp, Homo sapiens
  misc_feature 535, 550, 562: n = A,T,C or G
caagataaaagatttattcacaccacaaaaagataatcacaacaaaatatacactaacttaaaaaacaaaagattatagtgacataaaatgttatattctctttttaagtgggtaaaagtattttgtttgcttctacataaatttctattcatgagagaataacaaatattaaaatacagtgatagtttgcatttcttctatagaatgaacatagacataaccctgaagcttttagtttacagggagtttccatgaagccacaaactaaactaattatcaaacacattagttatttccagactcaaatagatacacattcaaccaataaactgagaaagaagcatttcatgttctctttcattttgctataaagcattttttcttttgactaaatgcaaagtgagaaattgtattttttctccttttaattgacctcagaagatgcactatctaattcatgagaaatacgaaatttcaggtgtttatcttcttccttacttttggggtctacaaccagcatatcttcatggctgngaaattcatggctgnggaattcacggntgactttggaaagttcctgactatcaatcacatcggaaatgctcat

SEQ ID NO: 1045 - DNA, 323 bp, Homo sapiens
  misc_feature 9, 14, 25, 29, 84, 114, 136, 190, 191, 203, 210, 231, 277: n = A,T,C or G
aattagtancacangttatttcttnaatnccaaacattttctaaaatattattacagcagatgcctaggatattaaaacataanggtggaaatcattctctaaatagttaaatntatttgacactgaaaatactgnacattttaattagaggaaaattaaaatgtgtgctcaaatgcactaacaaactanngtagcagggcanctaacanctacaaataagtcactgtggnccatttttacgtatgcatatatatgattattctctagataatccgncttcttgaaaatgctaataaaacataaaaatccagataaatgattt

SEQ ID NO: 1046 - DNA, 553 bp, Homo sapiens
  misc_feature 27, 542: n = A,T,C or G
ttggtgaggagctgttgggtcgtgtanttgatgcccttggtaatgctattgatggaaagggtccaattggttccaagacgcgtaggcgagttggtctgaaagcccccggtatcattcctcgaatttcagtgcgggaaccaatgcagactggcattaaggctgtggatagcttggtgccaattggtcgtggtcagcgtgaactgattattggtgaccgacagactgggaaaacctcaattgctattgacacaatcattaaccagaaacgtttcaatgatggatctgatgaaaagaagaagctgtactgtatttatgttgctattggtcaaaagagatccactgttgcccagttggtgaagagacttacagatgcagatgccatgaagtacaccattgtggtgtcggctacggcctcggatgctgccccacttcagtacctggctccttactctggctgttccatgggagagtattttagagacaatggcaaacatgctttgatcatctatgacgacttatccaaacaggctgttgcttaccgncagatgtctct

SEQ ID NO: 1047 - DNA, 459 bp, Homo sapiens
aaataatgtcaaatggaagtatgtagcaccccccccaccttcttttcccctttctttcctctttgagtctgctgtcattccctttttcatgagttttctctgctccccaaataggctaaacaataaccgtaaagtgagattagagaaaataagaatggagtagatgatggaattcaaaatagctgtctacattcttcactgagaaagatagctttgagttaaaggtgagaggagcaaatctggggaaaaacgggtgaaacggcatgatttaagtagcataccagatgcgtttctgcatggcatggctcttgcttgatgaataatgttctgtatagtagaagaggaaaatacagtgagtgaaggagctggcagaaggtgggctgggggagttggggaagagtgaaatgagtatggagaggtgagagagctgactgcaaaggcatgtggggtgtggatttc

SEQ ID NO: 1048 - DNA, 356 bp, Homo sapiens
aaatgttctcaccacaaagaaattataagaggttatggatatgttaattagcttgatttaataattccataatgtatacatatataataatataatattgtaccccataaatacatacaattattatttgtcaattaaaaataaaataaaaagacgtaagtcactaagtccagcccattttcaggatgaggaagattaagcttcatctcttcaaaggagaagaatcagactttatggatataaaactaccacagaagtgatgttaatgtctcatttgaataattgatttgaaattttttgcatttggtagaactctgtgcttgcatgtgcttgttacttttttgttcataagtttt

SEQ ID NO: 1049 - DNA, 349 bp, Homo sapiens
  misc_feature 260: n = A,T,C or G
ctgagctgaaggaaaagattgatcgccgttctggtaaaaagctggaagatggccctaaattcttgaagtctggtgatgctgccattgttgatatggttcctggcaagcccatgtgtgttgagagcttctcagactatccacctttgggtcgctttgctgttcgtgatatgagacagacagttgcggtgggtgtcatcaaagcagtggacaagaaggctgctggagctggcaaggtcaccaagtctgcccagaaagctcanaaggctaaatgaatattatccctaatacctgccaccccactcttaatcagtggtggaagaacggtctcagaactgtttgtttcaattgg

SEQ ID NO: 1050 - DNA, 297 bp, Homo sapiens
  misc_feature 3, 16, 85, 250, 285, 287: n = A,T,C or G
atnacaggggctgcanaacaaatcaagcacatccttgctaatttcaaaaactaccagttctttattggtgaaaacatgaatccanatggcatggttgctctattggactaccgtgaggatggtgtgaccccatatatgattttctttaaggatggtttagaaatggaaaaatgttaacaaatgtggcaattattttggatctatcacctgtcatcataactggcttctgcttgtcatccacacaacaccnggacttaagacaaatgggactgatgtcatcttgancncttcatttat

SEQ ID NO: 1051 - DNA, 152 bp, Homo sapiens
  misc_feature 5, 57, 72, 75, 87, 94, 102, 132, 144: n = A,T,C or G
aacangaaggaggaatggcttgctggggagcccatccaggacactgggagcacatanagattcacccatgtntgntgaacttagagncattctnatgctttnctttataattcacacatatatgcagagaanatatgttcttgntaacattg

SEQ ID NO: 1052 - DNA, 466 bp, Homo sapiens
  misc_feature 10: n = A,T,C or G
ctgcctgtgngggactgagatgcaggatttcttcacacctctcctttgtgacttcaagagcctctggcatctctttctgcaaaggcatctgaatgtgtctgcgttcctgttagcataatgtgaggaggtggagagacagcccacccccgtgtccaccgtgacccctgtccccacactgacctgtgttccctccccgatcatctttcctgttccagagaagtgggctggatgtctccatctctgtctcaactttacgtgtactgagctgcaacttcttacttccctactgaaaataagaatctgaatataaatttgttttctcaaatatttgctatgagaggttgatggattaattaaataagtcaattcctggaagttgagagagcaaataaagacctgagaaccttccaggaaaaaaaaaaaaaaaaaaaaaagttttgtacaagctttctttttttttttttta

SEQ ID NO: 1053 - DNA, 454 bp, Homo sapiens
ctgcttgtagccactgtgtttatgtcaaagcattcatttttttttaggatatctgaaaaaatgccatataagagaaaactctataaaacatctataattttcgaacccaagtacactcttgcattctatgctttaagttaaatgcaaactcctttttccttcttcctgctgcaagtactatctcatcctgatgctcaagagtgtcagggcctgggtttccaaacagagactaccctaaaattatttggcgagtagtactttacacaattgcctctcccccacaaatcataattgtttcagtaaaatggttacttggtttttccaagaaaaaactcgtttttactcatttttggcctgtttgtttatttagaaactaatctggattcactccctctggttgatacccactcaaaaaggacacttctgattaagacggttgaaactagagatggac

SEQ ID NO: 1054 - DNA, 594 bp, Homo sapiens
  misc_feature 585: n = A,T,C or G
ccagttctgttggtgagccccctacccccaccccacccatcccagtactgttgaatgctcatgttaatgatttgccaggtgtgtgcataaagttgtaaaatggggacacttctggaacaccaacaacaaactcaacaatatggatgatcatggcattgatttgaaaggcagcatttccaaattgatattttccagagaggaacatagcaggtagaaaattccaatggttaaaagctgaaaagaagtcccacatgaaagcagtaagaggtcaaaactgagtatcactagagtttctgggtgggagcttttttatttttaagaatggcaagttatgtttagctgagtaacagtggcaaggagaggtcaatgctgacattcctgaaagtcaacttctttacatgatgactacttaggctgctattttaggatacttaaagatctctaagacttggattagacttaacttgaataccttattctgtgaccaaattacatgaaaagaagatacatagttattatttccattcccttttctggagacagcaagttctttctaattaaccatagggttcatgtgaatagganctttgtaag

SEQ ID NO: 1055 - DNA, 107 bp, Homo sapiens
  misc_feature 60, 62, 69, 70, 81, 83, 86, 94: n = A,T,C or G
gtacaagcttttttttttttttttttttttttttttttctttttttttttttttttttgncnttcaaannctaatttattntnttnttttattntttttcaaaagtt

SEQ ID NO: 1056 - DNA, 346 bp, Homo sapiens
ctgccctgtgtgggactgagtggcaagtccctttgtgacttcaagaaccctgacttctctttgtgcagagaccagcccacccctgtgcccaccatgaccctcttcctcatgctgaactgcattccttccccaatcacctttcctgttccagaaaaggggctgggatgtctccgtctctgtctcaaatttgtggtccactgagctataacttacttctgtattaaaattagaatctgagtgtaaatttactttttcaaattatttccaagagagattgatgggttaattaaaggagaagattcctgaaatttgagagacaaaataaatggaagacatgagaactttt

SEQ ID NO: 1057 - DNA, 299 bp, Homo sapiens
ttattttcatctctcatcttttgtcctccttagcacaatgtaaaaaggaatagtaatatcagaacaggaaggaggaatggcttgctggggagcccatccaggacactgggagcacatagagattcacccatgtttgttgaacttagagtcattctcatgcttttctttataattcacacatatatgcagagaagatatgctcttgttaacattgtatacaacatagccccaaatatagtaagatctatactagataatcctagatgaaatgttagagatgctatatgatacaactgtgg

SEQ ID NO: 1058 - DNA, 396 bp, Homo sapiens
ccacctcatagagagttcccagcatgacatgaaactaactcacaaagctatcattatactgtcagagaaaccgtgctctatccatttgcatttcgaagcaggaataaaaagtgtgggctttttatttttgtgcgttttgtttttgtgtgggtttttttttaatattttttgttttgtttttgttttgttttttggttcagcataacttggaacatttgaaagcttttcaacctaaatgtggggaaaaaacaggtaaggcattatttttgcacaaaactagcattcctaatagtgcaaatgaatctgatacctcttaaaatggtgagaggtcatacacttactagattaatttagattttctttctatggcttgacaaattatccctctataaattc

SEQ ID NO: 1059 - DNA, 120 bp, Homo sapiens
  misc_feature 92: n = A,T,C or G
aaaaaaaaaaaaaaaaaaaaaaaaaaaaaaaaaaaaaaaaaaaaaaaaaaaaaaaaaaaaaaaaaaaaaaaaaaaaaaaaaaaaaaaaaaanaaaaaaaaaaaaaaaaaaaaaaaaaaaa

SEQ ID NO: 1060 - DNA, 363 bp, Homo sapiens
cctggttttgggcctggcgctgggctgcttgtctttggttctacttccttgttgtttttttcttaaaagaggtactgagtataaaacaatataaaacaatatgagagggtctctctcttccctcatttcccctctttgagactctcactttttatcagtgggagttctcactcttatttttgctacttatgtattttcgtgcaatagattgatagtgatttatatagtatgcttgtgctgaagcattttggtgaactaaggttaagcgacgaagttttttatcatttggagaaatacaggtatcagacaagggagcagtaagcaggttcctattactattattactcttattataagagtttt

SEQ ID NO: 1061 - DNA, 403 bp, Homo sapiens
aaaaacgtaaatttgagcctgtatacagatgggcccagtttcatagcccttccttagataaaagcctaaagaaggaaaatgtctgcaccttgtgaactttacatattttgcaagaactttctctttgagatttagtgatagtttttagttgttagacaccccaccttcagcttgtacctgaaagctttatctcgttataaataattcactgtaatttaggggaattatgtcctgttgctaaaggattctcaaacctgccatccccaaggaaaatcatgtattagtattgctaaatgatggtctgtatattctttgttttgaaggtggctagatgtttgctgtaaacttgaatgggagaattatattcttaaagtttacaccccctataagcctaaagccattt

SEQ ID NO: 1062 - DNA, 387 bp, Homo sapiens
ctgaaaggatccctttactatatgagcaagtggaaaagcagtaactttcaattttcaacgcttccacactgcaaaatcatgaaatttcttcaagtcttttgacggtacataaccaatcagaatttgttcactagttttataactttcactttcactaagaggtcatggtgatttgctaaggctctaattttcttaacacacactccagatgtagtgcataagtaaaaaagggaacctttattgaattctctatagttaaacacttctgctctgagattgtcatagataatctcaaatagagtaagggcattaataaggatttctgattccacgtaagaattatagagggaactaaatgatgctggcacttgggtactgagaagtttc

SEQ ID NO: 1063 - DNA, 257 bp, Homo sapiens
aagtaattggctttagattttgtaatttttttccctgagttcctgctagatttcgtattctagtagtcaatgtattttcagtgaaatgcaaaaatattcccattatctttgaccagtattaatttttgagatcttactgcttgtcacttgaatcccgtgattgtcatacatctctggtataagcaacatttgatttttgaagtgtgtagaccatctcttcatattttcaagatgtaattttacatttctgcattttt

SEQ ID NO: 1064 - DNA, 389 bp, Homo sapiens
  misc_feature 371: n = A,T,C or G
aaaaaaatgtaaacagtttaatttttacattattgtaaaaaagaagactcactccttaatgtggcttaatttttttttaagtgagcaaagcctggtgctcatggataaagaatgaaaataattctttacatagaaacattgtgctccagtgtggcaaagaaaaaaaaattatatgtacacatataaagaaaagaatcttaagcccacaatttagaccacaaaaaaatcttgtccccaaattgagaaatttataaaaaccatttacatatggttgttgacctactggaaacctatataccattttcaaaacaataactcagtcaaaagataccacttttattaaaaatgaaattttgtgcaaaaaaaaaatngtttaagctagaaacaag

SEQ ID NO: 1065 - DNA, 524 bp, Homo sapiens
  misc_feature 423, 430, 502: n = A,T,C or G
gtgattaaggaagtccaggagttttacaaggacacctacaacaagctgaaaaccaaggatgagccccagcgggaaacgctgaaagccatccactatgcgctgaactgctgtggtttggctgggggcgtggaacagtttatctcagacatctgccccaagaaggacgtactcgaaaccttcaccgtgaagtcctgtcctgatgccaccaaagaggtcttcgacaataaattccacatcatcggcgcagtgggcatcggcattgccgtggtcatgatatttggcatgatcttcagtatgatcttgtgctgtgctatccgcaggaaccgcgagatggtctagagtcagcttacatccctgagcaggaaagtttacccatgaagattggtgggattttttgtttgtttgttttgttttgtttgttgnttgttgnttgtttttttgccactaattttagtattcattctgcattgctagataaaagctgaagttactttatgtttgncttttaatgcttcattcaatat

SEQ ID NO: 1066 - DNA, 527 bp, Homo sapiens
aaacatgatagtccataaccattttgaaatgctgggcaaactacatgaagttatttataattaattcacagctaatcaggcattttgaaagcttaattggattcaaaaaccataatgttggaatttggtaaaattttaatgttgatttttactgtgaaaaggtttttataagatatacacaccctagtttaatgttgtgtcttggtgtggatttacagatttactacaggtattctgaaccaggaacacaatcaggtttcaggccagtttgatactggctgtccttaattctaatatgagagtaggacatcatactaaatgttatgtcagtgggactgtactgtctgtggaacttagcaaattaatcattttcttcagacttgaaggagagtgataaataaaatttggagtcataggatattgatgcacaatttaaggattaaacatttttaatcaattgtggatgatggcttattaaatgttgacttcctagtataaaactgcaagaataaaagtaacttctccag

SEQ ID NO: 1067 - DNA, 264 bp, Homo sapiens
gccgctgtctctgaggggtgggggtgccgctctaaattggctccatatcatttgagtttagggttctggtgtttggtttcttcattctttactgcactcagatttaagccttacaaagggaaagcctctggccgtcacacgtaggacgcatgaaggtcactcgtggtgaggctgacatgctcacacattacaacagtagagagggaaaatcctaagacagaggaactccagagatgagtgtctggagcgcttcagttcagcttt

SEQ ID NO: 1068 - DNA, 439 bp, Homo sapiens
cttattcctcttcattttgtcttctcacttacctgcagaaacccagtttatttttgttctccctttaccacaccagccttgtaactgttatgaatgaccctcaatctcactggaatctgaatcactcaggaattcaagcaaactggatgttttaaccactgttcagctttcttatggaatgacagagaacttgtaaagataaaacaccagtttgcaggaagaaaggaagagaatggaaattacttctggaaaatactagttttacaatatgttttgtttgtctgctctcttaaataaacttaatcctataaacattttttaagaactagccattaagactgttaagttctcaattataaaggaataaaatgttttaaggaggatttatttgcccttgcttatatgaactgcatatttttagtaggaaatcatgtaattt

SEQ ID NO: 1069 - DNA, 405 bp, Homo sapiens
aaaaaaaagtctggaaattaagcaaacattcctaacaccagctagacgatgttccggttaaagcccctaaaatacaaagaaataattgttatactttctttacatacaggtcttcacttttgctgcgaaacagaattttgggcacacagccagactactaacacatttcaataccattaatatgttttgttttttctcagaaactcaaaatatttgttaattcaacatatataaagatcatttaacatgtgaaaatacaagtaccagaaaaataagctggcagcagcactattccaaattttcaaacaagttttatttccatacaattctgacatttccgttttttgtttttttcttaaatgtacacagggaacatgattctttttatgcaaacaataacttagg

SEQ ID NO: 1070 - DNA, 385 bp, Homo sapiens
aaaacattgttttctaaacactaacaaaaaaaattaagggcaaactgaaaatacaaatgagatttacaggcactgtgtgtagaatgtgcaaaaattcacttagcttttcttttgtttttttggtgttgctttaagaaactttatcaaatatatttcttacaaatataaagctttctctcccaattgaaggcaattaaaaaaattcaaagtttatcaatactcagtacacaagtgaaccagtcaaattcattttctttctggaaaagaataacaaaccaatatttaggatgttcagagactcaacaaaaaccattctagaaatcacccagaacaattgttttctgttgccaaagccttttattcttcaaaagtcaccatccaccag

SEQ ID NO: 1071 - DNA, 527 bp, Homo sapiens
aaaatgagctacttcttattcacttttgtaaacagctaatagcatggttccaattttttttaagttcactttttttgttctaggggaaatgaatgtgcaaaaaaagaaaaagaactgttggttatttgtgttattctggatgtataaaaatcaatggaaaaaaataaactttcaaattgaaatgacggtataacacatctactgaaaaagcaacgggaaatgtggtcctatttaagccagcccccacctagggtctatttgtgtggcagttattgggtttggtcacaaaacatcctgaaaattcgtgcgtgggcttctttctccctggtacaaacgtatggaatgcttcttaaaggggaactgtcaagctggtgtcttcagccagatgacatgagagaatatcccagaaccctctctccaaggtgtttctagatagcacaggagagcaggcactgcactgtccacagtccacggtacacagtcgggtgggccgcctcccctctcctgggagcattcgtcgtgcccag

SEQ ID NO: 1072 - DNA, 305 bp, Homo sapiens
ctcaattacaatatatacaccaacaaacaatgttcaaccagtaactactactaatcaacgcccataatcatacaaagcccccgcaccaataggatcctcccgaatcaaccctgacccctctccttcataaattattcagcttcctacactattaaagtttaccacaaccaccaccccatcatactctttcacccacagcaccaatcctacctccatcgctaaccccactaaaacccatagaatgagaacataagtgcatttgaattttttctgagttctggctataggctctgacaagcctatca

SEQ ID NO: 1073 - DNA, 524 bp, Homo sapiens
aaaactttttgaagctacttattttcagccaaataggaatattagagagggactggtagtgagaatatcagctctgtttggatggtggaaggtctcattttattgagatttttaagatacatgcaaaggtttggaaatagaacctctaggcaccctcctcagtgtaggtgggctgagagttaaagacagtgtggctgcagtagcatagaggcgcctagaaattccacttgcactgtagggcatgctgataccatcccaatagctgttgcccattgacctctagtggtgagtttctagaatactggtccattcatgagatattcaagattcaagagtattctcacttctgggttatcagcataaactggaatgtagtgtcagaggatactgtggcttgttttgtttatgtttttttttcttattcaagaaaaaagaccaaggaataacattctgtagttcctaaaaatactgacttttttcactactatacataaagggaaagttttattcttttatggaacact

SEQ ID NO: 1074 - DNA, 360 bp, Homo sapiens
aaaatttttgtttataaattgagaaggaattttctctctataagtttctgtcattgaacagatcaccattaaaaagaatattagaatccagcatgaagataatggctaataaaaatgaggtacatactttataaaaccattaatcagatttgaatgaggaatgcttcccacatccttgaaagaaaaactgtggcttacgttttgaagtattctgagaatgaagtattaagatccaatttctataagcaagatcagacttgttaagtatgccgcaagtaagagctaattcattcattccatgtgtgccactaaataaagagattgagcaagtacaaaaaaaaaaaaaaaaaaagcttgtac

SEQ ID NO: 1075 - DNA, 173 bp, Homo sapiens
ctgtggaggggacactgtctttgaggcatcactggttccacaaaaggtaggggaaggtcttgagggaccaccccatgccctcattaatcaaccagaagcttggcccggagcagcagcggggattccagtagctgtgggcatacaggatgctagggcggccacaacccaggcag

SEQ ID NO: 1076 - DNA, 374 bp, Homo sapiens
cagccctgccctccccgatcccctggctccccagcacacattcctttgaaataaggtttcaatatacatctacatactatatatatatttggcaacttgtatttgtgtgtatatatatatatatatgtttatgtatatatgtgattctgataaaatagacattgctattctgttttttatatgtaaaaacaaaacaagaaaaaatagagaattctacatactaaatctctctccttttttaattttaatatttgttatcatttatttattggtgctactgtttatccgtaataattgtggggaaaagatattaacatcacgtctttgtctctagtgcagtttttcgagatattccgtagtacatatttattttt

SEQ ID NO: 1077 - DNA, 412 bp, Homo sapiens
aaatactgttttactgtccaaagacatgtttatagtgctctgtaaatgttcctttcctttgtagtctctggcaagatgctttaggaagataaaagtttgaggagaacaaacaggaattctgaattaagcacagagttgaagtttatacccgtttcacatgcttttcaagaatgtcgcaattactaagaagcagataatggtgttttttagaaacctaattgaagtatattcaaccaaatactttaatgtataaaataaatattatacaatatacttgtatagcagtttctgcttcacatttgattttttcaaatttaatatttatattagagatctatatatgtataaatatgtattttgtcaaatttgttacttaaatatatagagaccagttttctctggaagtttgttt

SEQ ID NO: 1078 - DNA, 371 bp, Homo sapiens
ctgttaaagagtggaggacacccttgaccctaacaaggaaaacaaattaagcctttatgtacaagcaaatttagagctcttttaagtgtccaaagctattaattagtttaattaaggcattaaactaattctgaattaacatttttataaccaagaactaaaatgttcaaatttttttctagtacaaaaaaattaaatttgctttagttataaaagagctctgtcaatatacacaaactatatacttcagacattcacaaaaatgtgagcagaaggcttatcaaaagacatttaatacaattagttttcaacaaccccttggtggtccacatctacaaagatatccagcccaacccaaccccccttccaaa

SEQ ID NO: 1079 - DNA, 251 bp, Homo sapiens; identical to SEQ ID NO: 507

SEQ ID NO: 1080 - DNA, 287 bp, Homo sapiens
aaaaaatatgtatctaagaatgttctagggcactctgggaacctataaaggcaggtatttcgggccctcctcttcaggaatcttcctgaagacatggcccagtcgaaggcccaggatggcttttgctgcggccccgtggggtaggagggacagagagacgggagagtcagcctccacattcagaggcatcacaagtaatgacacaattcttcggatgactgcagaaaatagtgttttgtagttcaacaactcaagacgaagcttatttctgaggataagctctttat

SEQ ID NO: 1081 - DNA, 309 bp, Homo sapiens
cctgagcaccggttccttttgtcccatacgtcatgaagtcacactattgggaaacctgtgcttccctctccgtggcttaactccctgtcagtgtcggagtgtataagaatgcttgtaaatactgtaatatatttattaatatttgaaaggcattcattcagtggacagtgggaattaactctcccaaggcaagtgaaaatgaatgattgacgtacgttgatttaacaatcttactagattttaattcttaaggatttcaaatgaaaccagaaggtggttatgtaagaggcttaaaatgatcttatgttt

SEQ ID NO: 1082 - DNA, 430 bp, Homo sapiens
gtggcatgcggaacaccgtgggatgctcaaagataatgctatgttggaatacctgaagattgctcaggacctggaaatgtatggaatcaactatttcgagataaaaaacaagaaaggaacagacctttggcttggagttgatgcccttggactgaatatttatgagaaagatgataagttaaccccaaagattggctttccttggagtgaaatcaggaacatctctttcaatgacaaagagtttgtcattaaacccatcgacaagaaggcacctgactttgtgttttatgccccacgtctgagaatcaacaagcggatcctgcagctctgcatgggcaaccatgagttgtatatgcgccgcaggaagcctgacaccatcgaggtacagcagatgaaggcccaggcccgggaggagaagcatcagaagcag

SEQ ID NO: 1083 - DNA, 536 bp, Homo sapiens
aaaggaaaacaaacagtcatgttgggttttgattatttgtggtgctaagaagaagggaacatggttggaggcccagtgagagaaacagtgctttgaatcaaagagcagaatgatagaaactgacttcagagcaacttcttggcagcagtatccaatttggaagttgaaggtctgtcctggagccagatgctaacgaaacacagcaaatgcttttcctaaggcacaatagtcttttcagtgagctcaggaaccctgtttatgcagatcctcgttgaactttcttgctcctcctgtgcatgaagatgcccactccacagatgatgagccccagcacgaagcccccagctcccgtcaatgtcttactccgggcagaatcagactgtgccttccactccacggtgacaggactatccaggctggtgtgctccacttggcaggtgtagacatctccctgctggggggtcatttccagtatcaccaggatctggaaggtccagtctccattacggatcaggttggtggacacgaccccagac

SEQ ID NO: 1084 - DNA, 288 bp, Homo sapiens
ggcttactagaagtgtgaaaacgtaggcttggattaaggcgacagcgatttctaggatagtcagtagaattagaattgtgaagatgataagtgtagagggaaggttaatggttgatattgctagggtggcgcttccaattaggtgcatgagtaggtggcctgcagtaatgttagcggttaggcgtacggcctaattacaaattggatggaactgtgtttttttctgctttgttttttcagtttgctgtttctgtagccatattgtattctgtgtcaaataaagtccag

SEQ ID NO: 1085 - DNA, 470 bp, Homo sapiens
aaatcatttatctggatttttatgttttattagcattttcaagaagacggattatctagagaataatcatatatatgcatacgtaaaaatggaccacagtgacttatttgtagttgttagttgccctgctacctagtttgttagtgcatttgagcacacattttaattttcctctaattaaaatgtgcagtattttcagtgtcaaatatatttaactatttagagaatgatttccacctttatgttttaatatcctaggcatctgctgtaataatattttagaaaatgtttggaatttaagaaataacttgtgttactaatttgtataacccatatctgtgcaatggaatataaatatcacaaagttgtttaactagactgcgtgttgtttttcccgtataataaaaccaaagaatagtttggttcttcaaatcttaagagaatccacataaaagaagaaactatttttt

SEQ ID NO: 1086 - DNA, 541 bp, Homo sapiens
ctgagtctgagtgcactcaataaagatatcctcctgtatacaccccaaggtctctctctggtactcctgattcctgcaaaaagatgtcaatttataaacaatatacaggacagatgataaaacagcacaaagagtgttgctgattggtaatattttgccgttaacgttgtgattagaaaaaaatacataattaggaggtgcaatatggcattttggtattattatgatagtggtggcaggtaacagatatcaccaaattctgccctgccattcaattctattatttacaggattcctaagtgcactgtacacactacaaatgttatcagaaaggagttatactttatgagttacttcactagcacaataagtaggtatcgaaaaaaaaattgaaatgtatcatggagtttaggctttccatgtaatctggggctctttacttaccctaattttgaaataggtctattcagtgtatttttcagagggctatttagaaaaaaggaagcccaaactcacccaccctcagtctaggtacccactt

SEQ ID NO: 1087 - DNA, 540 bp, Homo sapiens
  misc_feature 482, 509: n = A,T,C or G
aaagaaatttctcaatccttcagccggtgatagcacgttcttaatgtctctttttattgcctgtaatgttattgcagatccacatctctcactcaactgttaatgtctcaacctccagaggcaccccacccagcacactgtcagtaaaggggcagattgaaacagtgagagttaagggtacagtagaaaattctgcatgtttgcagtgactagaatcagatagtagtgtggtggtttttttttttaatcattatgaagagtgggagcttgcaggtaaggcttctgtggtggtttgaaaagcagaaagcaataaatgaaacaaagtgtttgtgtaatatattcctgccttgtcttcttcactcagagttgaaataggttttgcagtaaagctggaaaaaaaaaagaaaacaaatgttcaaaactgtgtgtgttggtgggtggaatttcctttgcttatagtagtttcagtagtaactatatgnttttttttcctttctttttcacaggcncagaaaactgaatctgtagataacgagggag

SEQ ID NO: 1088 - DNA, 407 bp, Homo sapiens
ggaagtcttagaaaagccttgtaaatgcctatattgtgggcttttaacgtatttaagggaccacttaagacgagattagatgggctcttctggatttgttcctcatttgtcacaggtgtcttgtgattgaaaatcatgagcgaagtgaaattgcattgaatttcaagggaatttagtatgtaaatcgtgccttagaaacacatctgttgtcttttctgtgtttggtcgatattaataatggcaaaatttttgcctatctagtatcttcaaattgtagtctttgtaacaaccaaataaccttttgtggtcactgtaaaattaatatttggtagacagaatccatgtacctttgctaaggttagaatgaataatttattgtatttttaatttgaatgtttgtgcttttt

SEQ ID NO: 1089 - DNA, 357 bp, Homo sapiens
aaataaaaattgaaaaaaaggctgcatgcatccactagaaggagaggagaggaagggagcactgagtcaagtaacagagaatgggataaaataaagaagaaacgaaaggaaaatcagggaggacacagggtacgaaaaggagaaaataagggaagggaggaaggagaaaatggtagaggacataaggtgatagaaaaagggaaagtaaatttattatttctacttttcttggacaatatagagactcaaaatagttaatgcaacttgctccaaaagcgagagtgcaagaggtggtgggtctatcaattaaccttattgtcaaagggacaaggatgagcaagaaaaaattaggctcag

SEQ ID NO: 1090 - DNA, 535 bp, Homo sapiens
  misc_feature 528: n = A,T,C or G
agcacactgtctatggggagcccaggaaactgctcacccaagattgggtgcaggaaaactacctggagtaccggcaggtacccggcagtaatcctgcgcgctatgagttcctgtggggtccaagggctctggctgaaaccagctatgtgaaagtcctggagcatgtggtcagggtcaatgcaagagttcgcattgcctacccatccctgcgtgaagcagctttgttagaggaggaagagggagtctgagcatgagttgcagccagggctgtggggaaggggcagggctgggccagtgcatctaacagccctgtgcagcagcttcccttgcctcgtgtaacatgaggcccattcttcactctgtttgaagaaaatagtcagtgttcttagtagtgggtttctattttgttggatgacttggagatttatctctgtttccttttacaattgttgaaatgttccttttaatggatggttgaattaacttcagcatccaagtttatgaatcgtagttaacgtatattgctgntaatata

SEQ ID NO: 1091 - DNA, 470 bp, Homo sapiens
  misc_feature 208, 216, 267, 424: n = A,T,C or G
aaaaaatagtttcttcttttatgtggattctcttaagatttgaagaaccaaactattctttggttttattatacgggaaaaacaacacgcagtctagttaaacaactttgtgatatttatattccattgcacagatatgggttatacaaattagtaacacaagttatttcttaaattccaaacattttctaaaatattattacagcanatgcctangatattaaaacataaaggtggaaatcattctctaaatagttaaatatattngacactgaaaatactgcacattttaattagaggaaaattaaaatgtgtgctcaaatgcactaacaaactaggtagcagggcaactaacaaatacaaataagtcactgtggtccacttttacgtatgcatatatatgattattctctagataatccgncttcttgaaaatgctaataaaacataaaaatccagataaatgattt

SEQ ID NO: 1092 - DNA, 528 bp, Homo sapiens
  misc_feature 490: n = A,T,C or G
aaaccaaaattcaaggcagtactctgtcagcaattacaacttttaggtaaattacatgggtcaaaagtagcacaatttgattttatcatagtatgtttggggtatctgcaaaccattctagtgatagagctatgagaactggtcaacttaagagttcaaccatgtgaaagggagtaatttccagaaaattcttgaacagaaaagggcagtaaacaaaagaattattgaattataatagttgccaatacagatttcctttgctatttaattattgcaccaacgagatatgggcagtatggatatcttgccaacaatttcttccttaacaactacaggtttcttaattgactatgttgcctttcaaataattgcacgcacgatcacagctttctaaagacagaagagagaggaagtgaagccttgattcgccatctcaatccaaaagcagcaaagatgctcaaaccacaacaaagatttttaacactactgntttttttagttctatatacagaaataaatataaatggg

SEQ ID NO: 1093 - DNA, 407 bp, Homo sapiens; identical to SEQ ID NO: 1088

SEQ ID NO: 1094 - DNA, 531 bp, Homo sapiens
aaaaaaaaagtagagatggagtctcactgtcttgcccaggctggtgtcaaactcctaggctcaagtgatcctcccacctctactaatatgaattattaggctatgctaatatgaatttgtatactaatatgattgaaattagtttgacttctataataattgttctcccagattgggcttctgttttgatagtagaactaaattattaggctatttcaagaaattaatatattactggtagaaaaactgaagctacaaaatggcctggtttctcacttcagttaaatttgtgcttctgagtgcttgtattctaggtgaaaccgcactgagaaggtatttgtggcctatacgctgattcattgattagacttctttgcacaggagagctgctaaaaattactgcggtgaacaggtacgaagaaaaagactgttctctgcccttctttttgcaataaaatgttacaaactatcttgagtttgatcccttttcgggtgtttgggttttttttaacattcacatatttcttggaa

SEQ ID NO: 1095 - DNA, 248 bp, Homo sapiens
gcctcgtcgcacactgcctgtggcccccgagccaggcccagccccaggccagtcagccgcagactttggaaagcccaacgaccatggagagatgggccgttgccatggtggacggactcccgggctgggcttttgaattggccttggggactactcggctctcactcagctcccacgggactcagaagtgcgccgccatgctgcctagggtactgtccccacatctgtcccaacccagacctgcccgg

SEQ ID NO: 1096 - DNA, 463 bp, Homo sapiens; identical to SEQ ID NO: 287

SEQ ID NO: 1097 - DNA, 298 bp, Homo sapiens
aaattattaaacatagtaggtgcattaacataaatcagtctccacacagtaacatttaactgataattcattaatcagctttgaaaaattaaattgttaattaaaccaatctaacatttcagtaaagtttattttgtatgcttctgtttttaacttttatttctgtagataaactgactggataatattatattggacttttctctagattatctaagcaggagacctgaatctgcttgcaataaagaataaaagtctgcttcagtttctttataaagaaactcacactaaaaaaaaa

SEQ ID NO: 1098 - DNA, 270 bp, Homo sapiens
aaaaacaggaaaaatatcagttggcaaatgcaatcttttttttttttaagctaaaggtgggtgaactggaatgaaaatctttctgatgttgtgtctataagcagccttgatgggatatgttagaagtgtcatgaaagtgtgattctacttttgcagaaaaatctaaagatcaatttatatagctttattttttactttatcaaagtatacagaattttaatatgcatatattgtgtctgacttaaaattataatgtctgcgtcaccattt

SEQ ID NO: 1099 - DNA, 453 bp, Homo sapiens
cctcagtggagagtcgttctcatgctgacggggagaacgaaagtgacaggggtttcctcgtaagttttgtatgaaatatctctacaaacctcaattagttctactctacactttcactatcatcaacactgagactatcctgtctcacctacaaatgtggaaactttacattgttcgatttttcagcagactttgttttattaaatttttattagtgttaagaatgctaaatttatgtttcaattttatttccaaatttctatcttgttatttgtacaacaaagtaataaggatggttgtcacaaaaacaaaactatgccttctcttttttttcaatcaccagtagtatttttgagaagacttgtgaacacttaaggaaatgactattaaagtcttatttttatttttttcaaggaaagatggattcaaataaattattctgtttttgctttt

SEQ ID NO: 1100 - DNA, 353 bp, Homo sapiens
ctaatctggattcactccctctggttgatacccactcaaaaaggacacttctgattaagacggttgaaactagagatggacaggttatcaacgaaacttctcagcatcacgatgaccttgaataaaaattgcacacactcagtgcagcaatatattaccagcaagaataaaaaagaaatccatatcttaaagaaacagctttcaagtgcctttctgcagtttttcaggagcgcaagatagatttggaataggaataagctctagttcttaacaaccgacactcctacaagatttagaaaaaagtttacaacataatctagtttacagaaaaatcttgtgctagaatacttttt

SEQ ID NO: 1101 - DNA, 451 bp, Homo sapiens
ctgttaaagagtggaggacacccttgaccctaacaaggaaaacaaattaagcctttatgtacaagcaaatttagagctcttttaagtgtccaaagctattaattagtttaattaaggcattaaactaattctgaattaacatttttataaccaagaactaaaatgttcaaatttttttctagtacaaaaaaattaaatttgctttagttataaaagagctctgtcaatatacacaaactatatacttcagacattcacaaaaatgtgagcagaaggcttatcaaaagacatttaatacaattagttttcaacaaccccttggtggtccacatctacaaagatatccagcccaacccagccccccttccaaatcccacccccacagaaaagcacatacttaccagaatttttagcaagtatggtttgggaatttttgtggtttttgtttttt

SEQ ID NO: 1102 - DNA, 609 bp, Homo sapiens
aaaatgcgaatttattaaagtttaagacaattctgtattatataatagtgtacaatatgttcttattttagatgtagaaataaaggaaaactggctctcagatgaaaacagaaattgtgtctgacagttaatagaacgaatgtcccataaacaggagtaaaaattaaattttcctttaagacgattttacaattatttctcttgtccataatttcacttagttaaaaccacataaggactttatgaataccctcccctatactattcaagatatacatatgggctaactttcgtggaccgatctagaacctaaataccacttccaacattgtttgacttgtaaaaaaattaacttacaaataacacttttggagcataacctatttgaaagcttggaaccacctgtatttgtcatcttgagctcttcatttattttgactgtgatttatttggagtggaggcattgtttttaagaaaaacatgtcatgtaggttgtctaaaaataaaatgcatttaaactcatttgagagaatgccttttagtttaatgcatatttaaactaaattgatcctgtagtgttcctggagaagctagagcctgattgtaggc

SEQ ID NO: 1103 - DNA, 456 bp, Homo sapiens
tttgtgtctgagaccacaccccagtagcaggttacgccatgtcaccgagccccattgattcccagagggtcttagtcctggaaagtcaggccaacaagcaacgtttgcatcatgttatctcttaagtattaaaagttttattttctaaagtttaaatcatgtttttcaaaatatttttcaaggtggctggttccatttaaaaatcatctttttatatgtgtcttcggttctagacttcagcttttggaaattgctaaatagaattcaaaaatctctgcatcctgaggtgatatacttcatatttgtaatcaactgaaagagctgtgcattataaaatcagttagaatagttagaacaattcttatttatgcccacaaccattgctatattttgtatggatgtcataaaagtctatttaacctctgtaatgaaactaaataaaaatgtttcaccttt

SEQ ID NO: 1104 - DNA, 353 bp, Homo sapiens
  misc_feature 329: n = A,T,C or G
gcaacttagaggtggggagcagagaattctcttatccaacatcaacatcttggtcagatttgaactcttcaatctcttgcactcaaagcttgttaagatagttaagcgtgcataagttaacttccaatttacatactctgcttagaatttgggggaaaatttagaaatataattgacaggattattggaaatttgttataatgaatgaaacattttgtcatataagattcatatttacttcttatacatttgataaagtaaggcatggttgtggttaatctggtttatttttgttccacaagttaaataaatcataaaacttgcaaaanaaaaaaaaaaaaaaaaaaaaagcc

SEQ ID NO: 1105 - DNA, 500 bp, Homo sapiens
caggtaaaaaagctgctgttggatctagaaggtgaagaatttttttatgtatatatagacatatctatataaattgtctggctgaggcagggccttcagctatcatttggttaataaatacattttagtatttgcatttcctactgcctgcagagtttcaggtgcttgttgtgtgaaagttctgtagatgtgtgcaaatttaacgaaatgaaattgtatgtgtaaaaatgtacgatttttcactgtgcaactgtaaattataaataaaaaatatttttgctattcatggagtgtaatatttatgcacaccatcaaatagtttctgtactttttattgggtaaaaatggaattgaacagcaacctcaacataagattttttttctagtagcctcccactgattaaagaagcaagtttgaggtttcatccttcaaaagggggttccgagagagcaccgtagggcttttctcaaatagaaaagccagattttgaaaaaatttt

SEQ ID NO: 1106 - DNA, 307 bp, Homo sapiens
gctgcccacctcaccctcagctctggcctcttactcaccctctaccacagacatggctcagtcactggctctgagcctccttatcctggttccggcctttggcatccccaggacccaaggcagtgatggaggggctcaggactgttgcctcaagtacagccaaaggaagattcccgccaaggttgtccgcagctaccggaagcaggaaccaagcttaggctgctccatcccagctatcctgttcttgccccgcaagcgctctcaggcagagctatgtgcagacccaaaggagctctgggtgcagcag

SEQ ID NO: 1107 - DNA, 343 bp, Homo sapiens; identical to SEQ ID NO: 573

SEQ ID NO: 1108 - DNA, 505 bp, Homo sapiens
aaatgttactggtagaaaggcagttcaggtatgtgtgtatatagtatgaatgcagtggggacaccctttgtggttacagtttgagacttccaaaggtcatccttaataacaacagatctgcaggggtatgttttaccatctgcatccagcctcctgctaactcctagctgactcagcatagattgtataaaatacctttgtaacggctcttagcacactcacagatgtttgaggctttcagaagctcttctaaaaaatgatacacacctttcacaagggcaaactttttccttttccctgtgtattctagtgaatgaatctcaagattcagtagacctaatgacatttgtattttatgatcttggctgtatttaatggcataggctgacttttgcagatggaggaatttcttgattaatgttgaaaaaaaacccttgattatactctgttggacaaaccgagtgcaatgaatgatgcttttctgaaaacgaaaaaaaaaaaaaaa

SEQ ID NO: 1109 - DNA, 96 bp, Homo sapiens
agtggcggcagcctctacatcgagatcccgggcggcgcgctgcccgaggggagcaaggacagctttgcagttctcctggagttcgctgaggagcag

SEQ ID NO: 1110 - DNA, 224 bp, Homo sapiens
aaaaatattttagatggtaaccaaaactaacttacacaaactatttttgatgtagaatagaatgctgttctataataagaagtctgtagcacactggtaatccatttggatctacagaatacttgtttggaacagaatctgataatgagagaaaactcaaatgaatgtcagtgcagttgcttcaaaaaaattactgctaccacatgtactatcatcccccaagg

SEQ ID NO: 1111 - DNA, 472 bp, Homo sapiens
aaatcatttatctggatttttatgttttattagcattttcaagaagacggattatctagagaataatcatatatatacatacgtaaaaatggaccacagtgacttatttgtagttgttagttgccctgctacctagtttgttagtgcatttgagcacacattttaattttcctctaattaaaatgtgcagtattttcagtgtcaaatatatttaactatttagagaatgatttccacctttatgttttaatatcctaggcatctgctgtaataatattttagaaaatgtttggaatttaagaaataacttgtgctactaatttgtataacccatatctgtgcaatggaatataaatatcacaaagttgtttaactagactgcgtgttgtttttcccgtataataaaaccaaagaatagtttggttcttcaaatcttaagagaatccacataaaagaagaaactattttttaa

SEQ ID NO: 1112 - DNA, 478 bp, Homo sapiens
aaaatctaaacgttgaatatgggaagtataggatttttacttttacaccctgcagaagcatggacaaagttgcaaaatccttcatgaagggatatttccttcttcctctcatgtcctttgaaacagattcatttctcctttcatcttttaatgaaaatttagcttttctttctggcaagaccttagggtgaggtttagaacaaatttcagttaggcatagagagtaaatgcagtgtctggttggggtggaatcattggctttggaattagatcaatgtgggttcaaatcccagctcagccatatctatgaaagcgtgacttgcagataggtgaccacaaacaccacagccgtaatgatgataacgtgcctcatgctaaggttgggttatttgcaaagcacccagctcagcccctttaggctcaagtttcatttaatcctcacaaggaccccaagaggtagtttacatttacagaagag

SEQ ID NO: 1113 - DNA, 456 bp, Homo sapiens
gagatgtatcttttgctctctcttgctctcttatttgtaccggtttttgtatataaaattcatgtttccaatctctctctccctgatcggtgacagtcactagcttatcttgaacagatatttaattttgctaacactcagctctgccctccccgatcccctggctccccagcacacattcctttgaaataaggtttcaatatacatctacatactatatatatatttggcaacttgtatttgtgtgtatatatatatatatatatgtttatgtatatatgtgattctgataaaatagacattgctattctgttttttatatgtaaaaacaaaacaagaaaaaatagagaattctacatactaaatctctctccttttttaattttaatatttgttatcatttatttattggtgctattgtttatccgtaataattgtggggaaaagatattaaca

SEQ ID NO: 1114 - DNA, 382 bp, Homo sapiens
ctgtcagcaaatattaatgtgaaattttcctaacatgcattaaattataatagtccaagcaacactagttattttaacaatctaaatatagagtgttgctattttaagcaatcttgctatggcataattttattttacatatgtacaaattatgttattgtatatacagatcaaggaactcctccagttctctcatcttgatggcagttactgttcttcaggcagcaagttttactttgacttcttgctcacagcaagggacatagatgggcatttctttccaagttcaatacattcagggaagtctgcctctcagctcattgtttttctcaaggaatgatgagcagtgtcaaggatttgcacagataaatagtgtctccag

SEQ ID NO: 1115 - DNA, 315 bp, Homo sapiens
cagcgacgtgggggagttccgggcggtgacggagctggggcggcctgatgaggagtactggaacagccagaaggacttcctggaagacaggcgggccgcggtggacacctactgcagacacaactacggggttggtgagagcttcacagtgcagcggcgagtccatcctaaggtgactgtgtatccttcaaagacccagcccctgcagcaccacaacctcctggtctgttctgtgagtggtttctatccaggcagcattgaagtcaggtggttcctgaacggccaggaagagaaggctgggatggtgtccacagg

SEQ ID NO: 1116 - DNA, 176 bp, Homo sapiens
  misc_feature 107, 162: n = A,T,C or G
tgtacaagcttttttttttttttttttttttttttataataaaactttcttgatttttaatgaatagtgaagcatacaatgtaatataaacaagtatgatactgcanattatatttctgattcaaagtggaaaaaaaactgaaaaaaaaaaaaaagtttaanaactcattttgtca

SEQ ID NO: 1117 - DNA, 340 bp, Homo sapiens
ccaggacaccttcagagaggctagtgaagaggagaggaatgtagggtggatttgaaatgtgattaatagagtcaatgcagcacatgctagaaacagatacagagttttttgttgttttttaactattttaccagatgatactaactaaacaaacagaacaaagaaagagattcaagatctcacatgagtgagaatccagggccttcccctctggccctggccccagcctgggccttgtttttgctatttccacctaggcatctgccatgcagcagagttaggagcgtgtgggcggctgctgagactcacacaccacagtactggcatccttcaggggcag

SEQ ID NO: 1118 - DNA, 196 bp, Homo sapiens
cagctttcttgctcccttcagcccccagcccctcccccatctcccaccctgtacctcatcccatgagaccctggtgcctggctctttcgtcacccttggacaagacaaaccaagtcggaacagcagataacaatgcagcgaggccctgctgcccaatctccatctgtcaacaggggcgtgaggtcccaggaagtgg

SEQ ID NO: 1119 - DNA, 452 bp, Homo sapiens
tatgagaccaccacttctcctgttgtccttcccagtttctccccaacctccccttttccctagtttgtaagacagcaaaaaagggagaaagcaaaaagttggaaaaaacagaagtaaaataaatagctagacgaccttggcgccaccacctggccctggtggttaaaataacaataatattaacccctgaccaaaactacctgtgttatctgtaaattccagacactgtatgagaaagcactgtaaaaactttttgttctgttagctgatgtttgtagcccccagtcacgttcctcacgctcacttgatctattatgactttttcacgtagaccccttagagttgtcagcccttaaaagagctaggaatttctttttcggggagctccgctcttaagacacgagtctgccgacgctcccggccgaataaaaaacctcttccttctttacctg

SEQ ID NO: 1120 - DNA, 402 bp, Homo sapiens
ccaaaaggaaaaaatagcaattcagtggttaattggtgaaagcaggaaatgtatgccctttactgtgctgctgttgctgctgttgttgctgctgttgttgctgctgttgctgctgcggcaggtgctgctgctgctgctgctgctgctttggtcttcttagttttgttctttttgtctctcttcttcaacccatccatgttagctctaaggaggtttgaataagccatctgaaacttattcacttccttggagctcaccacagtgctgatcttctttttcccatcggtagctcttaacagacacttgttgtctgcgggctcaaagccctccacagtacctttctttggaatgggtttggttcgaccgtcatacttcttcaaggtgatatagacgctgcccgac

SEQ ID NO: 1121 - DNA, 133 bp, Homo sapiens
ctggaggaaaggggctccaagccttgcttttaacacccctgcaaaacccccaccctcccaagatgttcacaaaaggtgagaaattcaggtacgaaaccatcaatggacaacttgaaaatgcatgttcctcagg

SEQ ID NO: 1122 - DNA, 552 bp, Homo sapiens
ccttgggcacaagatacccaatgtgtttgctgagtgcaactcagtggtgtccacctccgccctgtgcctgatagatgtgtatccatcaccccaccacccactgagtgcctctgtgggctccctgggtgtggttttaagcattggtaggccctgtatcatgggtgctgggctatcaggcccccccacctgtgtgtgatgttgtgttgacaccacctgggagggccgacagtccctcagtcttgtgtgtgcgctcatggaccgacatctccaccactgctggtgggctctgttggggaaagggttagttgtcttcagttgtatgcaagataactgcatcatgttgggtgggactatgactatgttatcgtacttatttggagattaagtgtggttaaggagatgtgtgagggtgcccagatgacaaggactagatggtcagttttttattttttttgagacagagtcttgccctgtcgcccaggctggagtgcaatagtgtgatcttggctcactgcaacctctgcctcccaggttcaaacgattctcctgcct

SEQ ID NO: 1123 - DNA, 276 bp, Homo sapiens
ctccagaagagctaaccagggcagggctggcatgagaagtgacatctgcgttacaaagtctatcttcctcataagtctgtaaagagcaattgaatcttctagctttagcaaacctaagccaaaggaaggaaagccacgaagaatgcagaagtcaaaccctcatgacaaagtaggcacaagtctacaataagctaaatcagaatttacaaatacaagtgtcccaggtagcattgactcccgtcattggagtgaaatggatcaaagtttgaattaagg

SEQ ID NO: 1124 - DNA, 535 bp, Homo sapiens
aaaataatggtaaatctggttcaataaagtagaaattcaaataccttgtttccccggtgaataccatccatttcttacacatggctacccaaagttctcaagccattttaattaagcactttcaatgaaatacaatgaaagtgggaaccaaactctgagaaatctttatcatggcatttctcattagtttcagcgaaatattttgaacagaaaaggaaagaaatttcccagtggcaattacaaaaccacatcttgtaattattttacaggactgctaccaaggcttctgcttctcttctccaggtacatctgtttgtaggtttgaaacatttcttttgaatcttttactgggttttgtagcatctcaaatccatctgcactgaagcttctcttcgagagtcttgaattaacattatctctctcttggctgtctttctgtgtccttttctttgtagcaacaaattttaaccagtcttcttttgtactttttattcctgaaacttgcagaggggcttgctccttcctaggatgaggc

SEQ ID NO: 1125 - DNA, 193 bp, Homo sapiens
ctgccacattagggtgtcttccaggctctgctgcaggaactgaggatgctgaagggcagggctgatcccttcgccccctctgaagtttaggccattgcctggatgtgcttttcgttggggaagatgccataggctccttcctcctttccagagagagggacacagtgagagggctggaggccctgaaagcctt

SEQ ID NO: 1126 - DNA, 518 bp, Homo sapiens
ctgtgtctccccctgcctccctcccacccgagggccctgctcacctggccccagcttggagatggcatataagagatcatagtttatgactggggtcgcatcttccacttgtttccatcccactggcggagaggcgggaggggagatcagaaactgcttgtctggatttggcggagccaggtgtgagcttcctatgtgtaaggtctgaggagagaaaataagcacaggtcagttgttgccagggaagaactgcagtgaggcaacagcacctaacgccagttccgggagatgggcaggtcaatgtccaggcgtcaggacaggtgtgattccgggaccaattgtaagatggtctgtaatggggagggcaaaaggacatatgaactctggttgtggcacagataggatgacagccccctcccagggctatgggagtcacaggcacagggactgcaaataattacgcttgacctagatggacagaaaatcagcagaggtgactttagtatatatggaaattt

SEQ ID NO: 1127 - DNA, 252 bp, Homo sapiens
ccaccaggccgctctggctgtgctgctctagcacaaaagcagccgcgaactacaggtgaatgagtgagtctggctgtgttccaacaaacactgttcataaaaaaggtgcctcaaaaaaaggtgcaggccccaatctgcagactcctgccacttgccacttctcttcctgctaaaactggaaagtgatgagacctcagaacagggatctcaaacggttcagtagcagaactcttgaactctgtaaaattattt

SEQ ID NO: 1128 - DNA, 459 bp, Homo sapiens
taaaattcatgtttccaatctctctctccctgatcggtgacagtcactagcttatcttgaacagatatttaattttgctaacactcagctctgccctccccgatcccctggctccccagcacacattcctttgaaataaggtttcaatatacatctacatactatatatatatttggcaacttgtatttgtgtgtatatatatatatatatgtttatgtatatatgtgattctgataaaatagacattgctattctgttttttatatgtaaaaacaaaacaagaaaaaatagagaattctacatactaaatctctctccttttttaattttaatatttgttatcatttatttattggtgctactgtttatccgtaataattgtggggaaaagatattaacatcacgtctttgtctctagtgcagtttttcgagatattccgtagtacatatttattttt

SEQ ID NO: 1129 - DNA, 428 bp, Homo sapiens
ctgcatcgcggcccacgacaagagggggaggtacgggaccctgttcacgatggaccgggtgctgacccccccaatggggactgtcatggatgtcctgaagggagacaatcgctttagcatgctggtagctgccatccagtctgcaggactgacggagaccctcaaccgggaaggagtctacacagtctttgctcccacaaatgaagccttccgagccctgccaccaagagaacggagcagactcttgggagatgccaaggaacttgccaacatcctgaaataccacattggtgatgaaatcctggttagcggaggcatcggggccctggtgcggctaaagtctctccaaggtgacaagctggaagtcagcttgaaaaacaatgtggtgagtgtcaacaaggagcctgttgccgagcctgacatcatgg

SEQ ID NO: 1130 - DNA, 365 bp, Homo sapiens
cctctctctccctgggaagtgttgcttgataaagatgcagcttttaattaatgtaactgttcaagattacagccggtcatcagctttctaaccagtgcctcacagctctgctggaagagccttgctccggtgatggttgatttgccattctctgtcccagcccagagaagctcctctcactgtcaacgtgccatctgtcaggtgcatgttataaagctgtcatcatgatcagctcattcacgcaccagctttagctttgaggaactgccggccatggcgttgaagacctgctgaagcctccagccagacatctgatgttcaggtctcagggggtccttgctgcttgtgtagcctgacaggtgtgg

SEQ ID NO: 1131 - DNA, 351 bp, Homo sapiens
caaactcaaatttctcctcaaatggggttaatctgacaaatgaggcatggacccagccttgtggaaaaagcattccacgctaatgagatcttggtctttcttgtgaggctacgttatttatgtaaatatgtctggaggcaccttctctaagcttttagttttctatgatctattagtttagtgtttattaaagaatcaaatgtatagaattaccaggcattcgtggggaatgctgtgtagcaaatgtaaaactgacctgctcggaagaaacgtaggaacgcttcaaacccactgtaatgtttggtttgagattattttcattgctttgagagtgaactgcctaagagtagg

SEQ ID NO: 1132 - DNA, 200 bp, Homo sapiens
ctgcttcccctgttactgcatcatcctgataaaggtttgtttttagcaaatcataaacatcttgacgtgcagttcccatggctgccaaaccaaggcccagactgccaccgtgtctaacgatatcattgctggcgttcttaagctgattaagcagatagtcaattatatcaccaccatgattggcatgaataagacctagt

SEQ ID NO: 1133 - DNA, 578 bp, Homo sapiens
  misc_feature 473: n = A,T,C or G
aaaaataaatatgtactacggaatatctcgaaaaactgcactagagacaaagacgtgatgttaatatcttttccccacaattattacggataaacagtagcaccaataaataaatgataacaaatattaaaattaaaaaaggagagagatttagtatgtagaattctctattttttcttgttttgtttttacatataaaaaacagaatagcaatgtctattttatcagaatcacatatatacataaacatatatatatatatacacacaaatacaagttgccaaatatatatatagtatgtagatgtatattgaaaccttatttcaaaggaatgtgtgctggggagccaggggatcggggagggcagagctgagtgttagcaaaattaaatatctgttcaagataagctagtgactgtcaccgatcagggagagagagattggaaacatgaattttatatacaaaaaccggtncaaataagagagcaagagagagcaaaagatacatctcataaatagttgaaattaaatattaaccaagaatactgaaaaaaaaccctactctttaattaaattaac

SEQ ID NO: 1134 - DNA, 350 bp, Homo sapiens
  misc_feature 18, 20, 30, 31, 36, 206, 211, 214, 223, 274, 304, 339, 347: n = A,T,C or G
aaaaataaatatgtactncntgaatatctnnaaaanctgcactagagacaaagacgtgatgttaatatcttttccccacaattattacggataaacagtagcaccaataaataaatgataacaaatattaaaattaaaaaaggagagagatttagtatgtagaattctctattttttcttgttttgtttttacatataaaaaacanaatancantgtctattntatcagaatcacatatatacataaacatatatatatatatacacacaaatncaagttgccaaatatatatatagtatgtanatgtatattgaaaccttatttcaaaggaatgtgtnctggggancca

SEQ ID NO: 1135 - DNA, 382 bp, Homo sapiens
  misc_feature 8: n = A,T,C or G
gaactggnaaggccaggtaactctagttacacagaaactgtgactaaagtctatgaaactgattacaacagactgtaagaatcaaagtcaactgacatctatgctacatattattatatagtttgtactgagctattgaagtcccattaacttaaagtatatgttttcaaattgtcattgctactattgcttgtcggtgttattttattttattgtttttgactttggaagagatgaactgtgtatttaacttaagctattgctcttaaaaccagggagtcagaatatatttgtaagttaaatcattggtgctaataataaatgtggattttgtattaaaatatatagaagcaatttctgtttacatgtccttgctactttt

SEQ ID NO: 1136 - DNA, 265 bp, Homo sapiens
  misc_feature 7, 18, 22, 30, 35, 42, 46, 49, 61, 82, 105: n = A,T,C or G
gaggatngtgtgaccccntatntgattttntttanggatggnttanaantggaaaaatgtnaacaaatgtggcaattatttnggatctatcacctgtcatcatanctggcttctgcttgtcatccacacaacaccaggacttaagacaaatgggactgatgccatcttgagctcttcatttattttgactgtgatttatttggagtggaggcattgtttttaagaaaaacatgtcatgtaggttgtctaaaaataaaatgcattt

SEQ ID NO: 1137 - DNA, 424 bp, Homo sapiens
cctggaaacgagggaagggctgagggctatgaggagtcccctagcgcaggtcttcggcagtgaacatgcccctggccctgcgcaggatggagtccttggcggcgccatatgggtgctccttggaggggatctccaggacagcggggatggactgctggtgggcgtccagggcatgccgcaccatctctgcgatgtactggttgatgaggatgatgccaatgtcatcccggtttagaaattgccggaaagtgtcttcgatctcattgatggttgtatccttctccaccaccaggaaattgggatggcggttcttgttaagctcccctatgccgcccagcaggaaaccagtcaccgtgtcctcgtctccgatcactgcgatgagcttacccctccccgccatccctgcagccgggcagagctcacc

SEQ ID NO: 1138 - DNA, 466 bp, Homo sapiens
  misc_feature 35, 72, 74, 79, 127, 195, 206, 278, 292, 296, 323, 343, 349,355, 391, 397, 431, 434, 446, 449, 452: n = A,T,C or G
gcttttttttttttttttttttttttttttccaanattgacaaaactttaataaaagttaaatttacagacntnttaanataacttgggaaatatgtagtaaaaaagaatcgagtccacaaattaanaatattttgctaatatgcccaacaccaatttcagcaaatccaatctacttaactcatatatttaatgnggtaatttttntaacaaaatttaatgggggtatgaatgatatatttatgcccttgacaaaaatgacatgtgtgattttgttgngactaaaaaagganagtntgatttctgggggttatgatatcactntggctcatcgaagctcacanaatatntaaggncctgccacgtccaaagatgttaggcaaatgtaatanaaggcncaccgggctgacacacgttttcatcatacaaatnttntggcagttcctnttnatntccatcaggaaaat

SEQ ID NO: 1139 - DNA, 277 bp, Homo sapiens
aaaaaatttctttgcagttaaaaggaagtggcataatgagcaggacaggacagttaccggctccccctcagatgcctctggctggcttctcacattctccaagatccagcctctaggctccagtctcggctacctctgctgggcggtagctcacaccccctttggttccccttctgtgctgccttctcatctgcacaaggaacgcgacgctggtgacagcaaaaaggaggccaaaaaccagggctaggatgtcaccagcagccaggcaggaattcag

SEQ ID NO: 1140 - DNA, 320 bp, Homo sapiens
ttttttttcgaaacagaaaaaaacaaaacactttattttccacaaggaagagcaataggaaaaattaaatcatttcccacatattgttttcttaaaacagagcctacaaggacatattcagcaccaaataaaaaaggaaaaaaagagaaattacaaacagccatagaatataatctataaagcaaacatttaatattgcactttgttttgctaacattttggattttacttttcctaattgaaaaatcaggaatctatcttgaatactggaatacaactgtgaacctcacatcttatgtcaggaattgaccaatattttt

SEQ ID NO: 1141 - DNA, 304 bp, Homo sapiens
ccaccccggagatgacacgaggctcacatgactctagacacttggtggaaagtgaggcgagaaaaacaatgacttgggccaattacacgactgcaaagctagagctgccaacagggctccagggagcttggcttctgtagaagttctaaggaagcggtacgaactccacggcggtggggcgctaactagcagggacccctgcaagtgttggtcgggggcctcgagctgcctgagctgacacgaggggaggggtctgtgtagccaacaggtgaccgaagggcttgcctgcccacagcttacttgg

SEQ ID NO: 1142 - DNA, 439 bp, Homo sapiens
aaatgtaatatttgatgcttataaaagggtaaatggggaatgcaaataaattatcaagcataataactcatcacctaacttaagaataacattatgagtgcttgtattttatctatttgagctcttctcctatctttgccgacccccccgctctctttttaatagatttgttcgaatgtagaaagacctaaaatacatatgtatccctaaagtgacttattttatagttttctttctttttgaacttcaaaaaaattgtatcatactctatgtagtctaaggatttggtttttttcactcaacatgtctctagaattcacaagttttattgttttatagctgtcattttcattgatgtatatttcattgttgggttatacaacatattgttaaggaatacatacatatataataaattatacattttttacctcggccg

SEQ ID NO: 1143 - DNA, 455 bp, Homo sapiens
attcatgtttccaatctctctctccctgatcggtgacagtcactagcttatcttgaacagatatttaattttgctaacactcagctctgccctccccgatcccctggctccccagcacacattcctttgaaataaggtttcaatatacatctacatactatatatatatttggcaacttgtatttgtgtgtatatatatatatatatgtttatgtatatatgtgattctgataaaatagacattgctattctgttttttatatgtaaaaacaaaacaagaaaaaatagagaattctacatactaaatctctctccttttttaattttaatatttgttatcatttatttattggtgctactgtttatccgtaataattgtggggaaaagatattaacatcacgtctttgtctctagtgcagtttttcgagatattccgtagtacatatttattttt

SEQ ID NO: 1144 - DNA, 419 bp, Homo sapiens
  misc_feature 109, 115, 116, 129, 138, 140, 144, 152, 157, 190, 221, 326: n = A,T,C or G
ttggatcctccagatagccactgccttttcctcaagggagcaacgttagctttcctgaatgatgaagtttggaatttgtcaaatgtacaacagggaaaatatctttgtntcttannggatgtgatgganaagttatcnantggngttttcanacctnagttggatgaacccattccactgtatgaggcanaagtttccatggaagctgttcagaaaaatcnaggaagaaaaaagcaagttgttcaattttaattttcttctttctcagacctcagtcggatgaacatattccagtatttgaagccagaattttctttggaaattgntgagaaaaaccaaggaagataaaacaagttgcatttttaagcacgtttctctgctaagacaagatgctcagttgacacatttgaaaagtgttt

SEQ ID NO: 1145 - DNA, 232 bp, Homo sapiens
  misc_feature 60, 118, 153, 214: n = A,T,C or G
tggtccgaatctgccctcctgcggtccatgcgatgccctgctgaggtctgtgaacacagntcatgagaaaccacggaaatggcccgaatgtgcttacgtgtgaaaatactgatactgngattcaacagagctgtttttcaagccaggatgcanaatgaggaatactaatgaaatgacggcctttaaggttgttgcttttgaagtcaagtcattnagtttgtgattagtgttt

SEQ ID NO: 1146 - DNA, 349 bp, Homo sapiens
tgctcatgtggtgttgaggaaagcagacattgacctcaccaagagggcgggagaactcactgaggatgaggtggaacgtgtgatcaccattatgcagaatccacgccagtacaagatcccagactggttcttgaacagacagaaggatgtaaaggatggaaaatacagccaggtcctagccaatggtctggacaacaagctccgtgaagacctggagcgactgaagaagattcgggcccatagagggctgcgtcacttctggggccttcgtgtccgaggccagcacaccaagaccactggccgccgtggccgcaccgtgggtgtgtccaagaagaaataagtctgtagg

SEQ ID NO: 1147 - DNA, 379 bp, Homo sapiens
gactgttcaagaacaaattaaagtttccacggcaaatttgttttcaaaatgccgaattgcgaaacaattgctggcttcacgtttctgaatacctttaatagtttctctgcgttgcagtttgtaagtttccttgtcatgacacagtcgataaataaagaaacccaggtgatcaatgttttcaatgcgatcagtaataaccatgtgctcatgaatcagataggactgaggcaaataggttccagccttgatgttaataagtaactccagtaggtttctgggtggcataacaatggaagtgttcagagggatcacatagcacttatccaggttaagatctaaataggctgtaagtttcctgttaaagtcatgaacaatgttg

SEQ ID NO: 1148 - DNA, 509 bp, Homo sapiens
gtggttatgaaaatgtcccaactgatgatatccacatgaagcaagttgatctggagaatgtatggcttcattttatccgggagttcattgcaccagttacactgaaggtctttgcaggctattatacgaagggatttgcactactgaattttgtagtaaaatactcccctgaacgacagcgttctcttcgtcctcatcatgatgcttctacatttaccataaacattgcacttaataacgtgggagaagactttcagggaggtggttgcaaatttctaaggtacaattgctctattgagtcaccacgaaaaggctggagcttcatgcatcctgggagactcacacatttgcatgaaggacttcctgttaaaaatggaacaagatacattgcagtgtcatttatagatccctaagttatttacttttcattgaattgaaatttattttggatgaatgactggcatgaacacgtctttgaagttgtggctgagaagatgagaggaatattt

SEQ ID NO: 1149 - DNA, 521 bp, Homo sapiens
cttcctccacccctagtggtcccctgggcaggtctttttttttgtaacactcaccagtctgttctgtagtcaatcattgattgacttgtctgtgaacttgcaggaactgtttcatagtttcattagcacagagtaaacatgtttgccatgcaaggttattttgcatctgcatttaagtgataatgttgaatcaatgaaaagtgttgattaagcagtagttgtagatatgctaagtttttcaaattactaatatcaagtggagattgtttttacttttaagggtattgcttttgtgatagcataaataatggttttccttttttgtaatgtaaattaattgctggcaacttttgtattcccatagactggggaagcttaattgcctttacaagtacttatgtacaactttgtatcaaattttctgtaatagtttatgctttagtactatatatgtactaataattttatctgacttctgtttatatcatctgtacaattacatggttgtaaaataaactttt

SEQ ID NO: 1150 - DNA, 371 bp, Homo sapiens
aaacaactttgtgatatttatattccattgcacagatatgggttatacaaattagtaacacaagttatttcttaaattccaaacattttctaaaatattattacggcagatgcctaggatattaaaacataaaggtggaaatcattctctaaatagttaaatatatttgacactgaaaatactgcacattttaattagaggaaaattaaaatgtgtgctcaaatgcactaacaaactaggtagcagggcaactaacaactacaaataagtcactgtggtccatttttacgtatgcatatatatgattattctctagataatccgtcttcttgaaaatgctaataaaacataaaaatccagataaatgattt

SEQ ID NO: 1151 - DNA, 170 bp, Homo sapiens
  misc_feature 15, 32, 40, 43, 53, 56, 75, 77: n = A,T,C or G
tacaaacagccatantaatataatctataaancaaacatntantattgcactntgntttgctaacattttggatntnacttttcctaattgaaaaatcaggaatctatcttgaatactggaatacaactgtgaacctcacatcttatgtcaggaattgaccaatattttt

SEQ ID NO: 1152 - DNA, 345 bp, Homo sapiens
  misc_feature 32, 61, 80, 87, 130, 133, 156, 168, 172, 178, 207, 230, 248,286, 335: n = A,T,C or G
ctttttttttttttttttttttttttcaaggnagtattaagtgtccatatttctcaagccncattcaaggaaatcatgtnttaactnttttggatgttgcctctccttcatcttgtacatgaaactccancanatttaatatcggcatccatcatntagtcaaacctntcanatgttnttcaaatcaatcaaatttgggattctcancattttctgtgtcaataaaaggngtggaattagtaaattcnatgaaaacctgtttttccttgccacattggacttccanaccccatttggattgggtttaaaaaatggggaaatttaaaaaacgtttnttggcctgag

SEQ ID NO: 1153 - DNA, 345 bp, Homo sapiens
aaactgcataatttagtaaaattggtacaatttcttttcacatattaatcaacattagaggactgtaaatgcctccctagtaatacagaaatatccattggaaataaaaatagcaccagtgggaaagtatgaaaaaataagacaaatcagcacatgaggaaatatagtttcattccaataataccattttacagtaattactgaaaaaaatggtaaaaactgtaaaacagtacatcacaaaactaataaaacatattccaaaatgttaatacttgttccaatgaggttggttacttttttatattcatcatcagattttatgtatttttatgtatttttgtattt

SEQ ID NO: 1154 - DNA, 385 bp, Homo sapiens
aaaattctaatgacatatatcaacacattcaatggctgttgttaacctttgaagtaaaaaggagatcactttttaccaaataaccaaaaatttttagtctttgtcaaagtgcacaggtatgttctcagaacatttttcacaatgtgtatcagaaatgtgtttgctatccttagagacagaaatgaatataacaaattgatctgcttatttattaaaattattattctagacttacaaaaggcttaaaaagaacaatcatttaatcagtaccattctgtatcttatataacagatctttgccaaattctagatattatagtgttgcctgtctgttctaaagcgaaccagccactttttcaatctggctttttggaagattgtattt

SEQ ID NO: 1155 - DNA, 330 bp, Homo sapiens
gaatgagaatattttcctacttgcaaaataatataatgaaaatatttttgtttctatgactttgtcttaacactttgtgtagcatcagcttctgagagataatcgagctgaaagaggacacaagaaaaattgttctgtgagaacagccagcaggcaaacaagcatgcatttaggatccttatgcacgggagatatcaaacggagaagaaaagctgcacctttgcctggacctactactgcaggatttgtaggtgaaaatgcccagccaatcctagaaaataatattggaaaccgaatgcttcagaatatgggctggacgcctgggtcagg

SEQ ID NO: 1156 - DNA, 443 bp, Homo sapiens
gtcggccttcccaacatggcgcagtctattaacatcacggagctgaatctgccgcagctagaaatgctcaagaaccagctggaccaggaagtggagttcttgtctacgtccattgctcagctcaaagtggtacagaccaagtatgtggaagccaaggactgtctgaacgtgctgaacaagagcaacgaggatgtatgtccctgggaagctgcatgatgtggaacacgtgctcatcgatgtgggaactgggtactatgtagagaagacagctgaggatgccaaggacttcttcaagaggaagatagattttctaaccaagcagatggagaaaatccaaccagctcttcaggagaagcacgccatgaaacaggccgtcatggaaatgatgagtcagaagattcagcagctcacagccctgggggcagctcaggctactgctaagg

SEQ ID NO: 1157 - DNA, 567 bp, Homo sapiens
  misc_feature 12, 59, 65, 86, 92, 95, 101, 102, 151, 470: n = A,T,C or G
tacaaatccaantttgctgacctctctgaggctgccaaccggaacaatgacgccctgcnccaggnaaagcaggagtccactgagtnccgganacnggtgcnntccctcacctgtgaagtggatgcccttaaaggaaccaatgagtccctgnaacgccagatgcgtgaaatggaagagaactttgccgttgaagctgctaactaccaagacactattggccgcctgcaggatgagattcagaatatgaaggaggaaatggctcgtcaccttcgtgaataccaagacctgctcaatgttaagatggcccttgacattgagattgccacctacaggaagctgctggaaggcgaggagagcaggatttctctgcctcttccaaacttttcctccctgaacctgagggaaactaatctggattcactccctctggttgatacccactcaaaaaggacacttctgattaagacggntgaaactagagatggacaggttatcaacgaaacttctcagcatcacgatgaccttgaataaaaattgcacacactcagtgcagcaatatattaccag

SEQ ID NO: 1158 - DNA, 179 bp, Homo sapiens
ccagggactgaagctgaacatctcccaactgcacaaattaccgtgtgagttatgtaagctacttaatgttgccctgcctctgcttccatacttgccaaatgagactacctgacagggtgttgtgaggattaaaggagtgacacccaccaaagctcataacacagcactcagaacgtttt

SEQ ID NO: 1159 - DNA, 525 bp, Homo sapiens
  misc_feature 483, 523: n = A,T,C or G
ggaaaggggcaagggctgggcggggatcacacagcacaacggcagcgcaagcaggctcgctgtcttgtgggccaccccacacacagccagtctgagctctgtctgtgctgttgctggaaagaatgagagaacacacagagagaaaaccgtgtctagggaaggcgatgcctggggctggaaaaaggaagcactctgcttgcccagaggctggaaggagctgctctgttccctccattcacccctgcctggctaagacctgcggtattcgggagcgtctgcacgcaagtgtccagtgtgcatatatggggagtcttcagttccgaagtcagccccgtaggtcattcccctaccatgctgggagcacgtgtcgtccacacagagcgtgcgtgtcaaaggatcaatcaccatcacagttgtgtgctgatttattaaatgtttatatgtccacagttatgttaaaaaaaaaaagctataaaatattgnattcactgagctaactttctattttaaaaatttaaatccnta

SEQ ID NO: 1160 - DNA, 409 bp, Homo sapiens
acctctcctacacaattcactgaacctcccctggaaggaggtttccacatcctgcagaggctaactgggcaccaatcatgcttccactaaccgacttggctgcttcctctagcgcttagtacttcaccgttccctttcttcatgggagatggtgtggtaattgataatcacaatacaaactctgaaacaagtaaacggacaataaaactcatatttgcctaaaatgagtttcgataaggatctcggtggctatcttgttagatcttagaaagctgaggcttattgagaaagcccttttccttcgggaaaaggaatttttgtatggttgggaaaaggttggtcactggctgatctataaagtccttttcattgtaagattatatgattttcggtaaactgtatatttttt

SEQ ID NO: 1161 - DNA, 342 bp, Homo sapiens
  misc_feature 71, 115, 127, 135, 140, 165, 221, 243: n = A,T,C or G
ctggcagtggagcctgctttatttagcaggggcctggaatgtaaacagccactggggtacaggcaccgaanaccaacatccacaggctaacaccccttcagtccacacaaagaancttcatattttntttataancatanaaataaaaaccaagccaatatttgngactttgctctgctacctgctgtatttattatatggaagcatctaagtactgtcangatggggtcttcctcattgtanggcgttaggatgttgctttctttttccattagttaaacatttttttctcctttggaggaagggaatgaaacatttatggcctcaagatactatacattt

SEQ ID NO: 1162 - DNA, 528 bp, Homo sapiens
  misc_feature 493, 520: n = A,T,C or G
ccgacgaggactctctcattgagatcatctgctccagaaccaaccaggagctgcaggaaattaacagagtctacaaggaaatgtacaagactgatctggagaaggacattatttcggacacatctggtgacttccgcaagctgatggttgccctggcaaagggtagaagagcagaggatggctctgtcattgattatgaactgattgaccaagatgctcgggatctctatgacgctggagtgaagaggaaaggaactgatgttcccaagtggatcagcatcatgaccgagcggagcgtgccccacctccagaaagtatttgataggtacaagagttacagcccttatgacatgttggaaagcatcaggaaagaggttaaaggagacctggaaaatgctttcctgaacctggttcagtgcattcagaacaagcccctgtattttgctgaccggctgtatgactccatgaagggcaaggggacgcgagataaggncctgatcagaatcatggtctcccgcantgaagtgg

SEQ ID NO: 1163 - DNA, 509 bp, Homo sapiens
gttaaacacagcacttaattacctcaaatccagatttctcttaatctgtgtgtacataaaaggaataagtccaaattaatttatagtttagtgttgcactataggtaatattcttttgttatttctagtttttatggaatccttttctttcaagattctaaataataaatcgttacctctcaatagtggtaatagtggtaatggtttattattagctatttcaccaattgaactacattcttttggagacattcctttcttttttgatgttgatttgcaaaggagaaatgcttgttaatatacaaactctagtcagttacctgtgaggatgagatgtgtcagaggactcagactttggtatagttagaaaaataatatttttctcacttgattctgtgtgaatgtctcttctgatactgttttttaatcagaaagttacagagcaactttcccacaaacaaaccaataaaacaaaaccccacaaaaaccaagagcatgaagaaaagttt

SEQ ID NO: 1164 - DNA, 566 bp, Homo sapiens
  misc_feature 516: n = A,T,C or G
ccagaattttgaacttctgatgaatgtgtaatgcaaaggaccttgtacatttttttgtttcaaggtcctcaaaatgagcacatgaagaggttgctgtgaaactttaagtggccctactgcgcagaagcattcagatgtcacttgatgatctgtaagggaacttgctgatttgggaatgtgcttagggaacacacattccttttgacagggtctgtcactgggtgggtgatgaattatacagatgacatgtgcttttttttcttttttcaacctcaatggtattcctacaggaaatggataaccattttaactgtattttttgcagcccgtaccttcttgggaatacaattgtctaactttttatttttggtctggctgttgtggtgtgcaaaactccgtacattgctattttgccacactgcaacaccttacagatgtggaagatgtgaaatttgtcatcaattatgactaccctaactcctcagaggattatattcatcgaattggaagaactgntcgcagtaccaaaacaggcacagcatacactttctttacacctaataaca

SEQ ID NO: 1165 - DNA, 556 bp, Homo sapiens
  misc_feature 528: n = A,T,C or G
aaaattgcttctcaccatttaacgatagctcagaacctgtgcgtcaaccagtacagtttgtcctcagtaatgtcctcaggctgtttcaattttgcttatatgatttaggtttgggtcatagtctccttggatggagtcatttttttttttttttaatttcagcagcagtcctattgttctggaaccttctgggacattcctgaagagtcaggacaatttcagggcttcctcagggactcagattctaaatgagattccaaattctgtaggcccagccgacattgatctaaacctttgggaaatacccctaaacatatctatgcctcagggtttgaaaaacaatgaagtgttggactgtttcagacttctcagattctcactggtaggagtgactacctaggcaatttcatcttagctgcaaccctgaaacgaagctctatttatttttcctatgttgtcatggcatttggtctcacctaaggggaaatcaggatgcctgagttctgggcaggtgataatagttcctgntcttatctctctgcctctttcctcattc

SEQ ID NO: 1166 - DNA, 514 bp, Homo sapiens
ctgactcatgtgaaaaaggcactatgaaaattaatgaatctagataatttctctaaatgatttatgttaaaatatacaacattcttacataacatctgttttatatatgtgaaataatataacatttaatgacaaaaattgtgtttccaaaaataacatttgttgaaggttaggtatctttcttttctctatgtggaatctttcacaggattaaaatatgtgtaaattaagtgcttcttattaccagaaatacttgacacagataaacacataaaatggccccacttccttttaactactcatatcaacattcagaactgaggctttcattaagcaaaatactgtaatgcacaccaatgcagactacttcctttgctagattttgagaagacatgacctctttcgcatttgtgctttctcatatataagaacacagtatacataataagcagaatataaactaaatcaaaatacaagctatacaaggagttgcaatcaacagagccatgacaaa

SEQ ID NO: 1167 - DNA, 433 bp, Homo sapiens
ccattatcaaaccagatattgttgacaaagaggaggagatacaagatattattcttagatccggattcaccattgttcagagaagaaaactacgcctcagccctgagcaatgtagtaacttttatgtggaaaagtatggaaaaatgtttttccccaacttaacagcttacatgagttctggaccacttgtcgccatgatattagctagacataaagccatctcttattggttagaacttttgggaccaaataatagcttagtagcgaaggagacacatccagacagtctgagggcaatttatggcacagatgacctaaggaatgcacttcatgggagtaatgactttgctgctgcggaaagagaaatacgttttatgtttcctgaagtgattgttgagcccattccaattggacaagctgctaaggactattt

SEQ ID NO: 1168 - DNA, 341 bp, Homo sapiens
  misc_feature 32, 38, 105, 132, 135, 145, 157, 166, 172, 205, 210, 230,245, 255, 264, 265, 271: n = A,T,C or G
accaatatgggccagccacattctaattgaanacccanagaaagcaaagccagcagcccagcccccagcccccagcccctgacctgcttggcggccctgatggtnccggcaaagtgtaaaccagtgcccctntgncgccctgggntcagcaggccancttaccctnggcacntacatgggaagtgcctgctcacgctaagcccantctgnagagggcgggtcctccctgnaggaaggtggcaganaggaatgtgnctatcaggnntggacnagagagatgaaagaaatgtgctcttcaactaaaggcacttgtcagcggccacctacagccattctctagg

SEQ ID NO: 1169 - DNA, 393 bp, Homo sapiens
aaacgtttgcccctggcgtttcctaagtacgaaaaggtttttaagtcttcgaacagtctcctttcatgactttaacaggattctgccccctgaggtgtaatttttttgttctatttttttccacgtactccacagccaacatcacgaggtgtaatttttaatttgatcagaactgttaccaaaaaacaactgtcagttttattgagatgggaaaaatgtaaacctatttttattacttaagactttatgagagagattagacactggaggtttttaacagaacgtgtatttattaatgttcaaaacactggaattacaaatgagaagagtctacaataaattaagatttttgaatttgtaaaaaaaaaaaaaaaaaaaaaaaaaagcttgtac

SEQ ID NO: 1170 - DNA, 560 bp, Homo sapiens
  misc_feature 513: n = A,T,C or G
aaagaacaaggtgaggaggctgaggcaggagaattgcttgaacctgggagatggaggttgcagtgagctgagatcacgccactgcactccagcctgggtgacagagtgagagactccgtctcaaaaatgaatgaatgaatgaatgaatgaatgaacgaacgaacaaggtggtttaatgtcagaaaacttcctaagcatttgctccccaaacctttcatgtttttcaagaagcctttattacataaaggggaatagaattaaaatgtttctttataagaaaaatatacatatttgtgttcttggccccattaaaactagtcagtagtcctttggcaaagatatagtcaacaagagaactgggtatgagtccaggcattactcctgttcatagttgtggatgcatgtgtctgagccagactgtctcaactggagtctcttgggttatagcagtaaacccgtgtattccatgaaaccactgggcccatcatcaaaaggtttccacttgtggtgccncagttgcttattactgagtttgggttccaagatgactggcaacttct

SEQ ID NO: 1171 - DNA, 310 bp, Homo sapiens; identical to SEQ ID NO: 955

SEQ ID NO: 1172 - DNA, 422 bp, Homo sapiens; identical to SEQ ID NO: 909

SEQ ID NO: 1173 - DNA, 359 bp, Homo sapiens
  misc_feature 42, 49, 248: n = A,T,C or G
gtacaagcttttttttttttttttttttttttttgcatgtanaattctntattttttcttgttttgtttttacatataaaaaacagagtagcaatgtctattttatcagaatcacatatatacataaacatatatatatatatacacacaaatacaagttgccaaatatatatatagtatgtagatgtatattgaaaccttatttcaaaggaatgtgtgctggggagccaggggatcggggagggcanagctgagtgttagcaaaattaaatatctgttcaagataagctagtgactgtcaccgatcagggagagagagattggaaacatgaattttatatacaaaaaccggtacaaat

SEQ ID NO: 1174 - DNA, 298 bp, Homo sapiens
aaagtatatctagggttatttttaatgttttatacttttatattctctataaaataacctatagttaagaaaacataccattctctcaaagcaaaataaaacaaagctttctttaatctgaaactaaagatgagctttccatttcttgtcaggatctgtgttgctaaatatttttccttctttttctagttttttcaaatgaagtaagagattatgtttagccatttcatgtaaattctcaggagtattcttgtaaataatttttacaagctccattactgtaaatgatttctcaaag

SEQ ID NO: 1175 - DNA, 177 bp, Homo sapiens
aaaattagccagagaattactgtaatatacattcagcctgcatcgtagaatactgtagtagcattttaataatcaatatctatcaattcatttcaataaaggaatactctatgcctggcactttgctagatattaaagttgtcattataactaaaataacatccttgtccacaagga

SEQ ID NO: 1176 - DNA, 372 bp, Homo sapiens
gtgggcttttaacgtatttaagggaccacttaagacgagattagatgggctcttctggatttgttcctcatttgtcacaggtgtcttgtgattgaaaatcatgagcgaagtgaaattgcattgaatttcaagggaatttagtatgtaaatcgtgccttagaaacacatctgttgtcttttctgtgtttggtcgatattaataatggcaaaatttttgcctatctagtatcttcaaattgtagtctttgtaacaaccaaataaccttttgtggtcactgtaaaattaatatttggtagacagaatccatgtacctttgctaaggttagaatgaataatttattgtatttttaatttgaatgtttgtgcttttt

SEQ ID NO: 1177 - DNA, 570 bp, Homo sapiens
ctaactcaggaaactaacaaggtggagacgtacaaagagcagccgctcaagacacctgggaagaaaaagaaaggcaagcccgggaaacgcaaggagcaggaaaagaaaaaacggcgaactcgctctgcctggttagactctggagtgactgggagtgggctagaaggggaccacctgtctgacacctccacaacgtcgctggagctcgattcacggaggcattgaaattttcagcagagaccttccaaggacatattgcaggattctgtaatagtgaacatatggaaagtattagaaatatttattgtctgtaaatactgtaaatgcattggaataaaactgtctcccccattgctctatgaaactgcacattggtcattgtgaatattttttttttgccaaggctaatccaattattattatcacatttaccataatttattttgtccattgatgtatttattttgtaaatgtatcttggtgctgctgaatttctatattttttgtaacataatgcactttagatatacatatcaagtatgttgataaatgacacaatgaagtgtctct

SEQ ID NO: 1178 - DNA, 244 bp, Homo sapiens; identical to SEQ ID NO: 266

SEQ ID NO: 1179 - DNA, 232 bp, Homo sapiens
  misc_feature 29, 31, 40, 52, 60, 87, 96, 103, 135, 143, 146, 164, 166,172, 185: n = A,T,C or G
aataacttccaaggcattacaactttttntntggcatgtnaaaaaacaactntgactaanggctaatgcattataaaatttcctatntgacaaatntttctanattatgcatagtattttacttttgaaaggtcntaaaaaanatntaaatcagtttccataananctaatnttggcccataacnaaagtttccttcaggttattttaatgtattaacgtaagaaaactcca

SEQ ID NO: 1180 - DNA, 347 bp, Homo sapiens
ctgcagcaaacgcctcatatcccaaaaacggtgcagtagaatagacatcaaccagataagtgatatttacagtcacaagcccaacatctcaggactcttgactgcaggttcctctgaaccccaaactgtaaatggctgtctaaaataaagacattcatgtttgttaaaaactggtaaattttgcaactgtattcatacatgtcaaacacagtatttcacctgaccaacattgagatatcctttatcacaggatttgtttttggaggctatctggattttaacctgcacttgatataagcaataaatattgtggttttatctacgttattggaaagaaaatgacattt

SEQ ID NO: 1181 - DNA, 189 bp, Homo sapiens
tccaactgcttatgaaaagtactaatagaacttgttaacctttctaaccttcacgattaactgtgaaatgtacgtcatttgtgcaagaccgtttgtccacttcattttgtataatcacagttgtgttcctgacactcaataaacagtcattggaaagaaaaaaaaaaaaaaaaaaaaaaaaaaaagctt

SEQ ID NO: 1182 - DNA, 350 bp, Homo sapiens
  misc_feature 77, 153, 202, 211, 219, 236, 267, 311: n = A,T,C or G
gctttttttttttttttttttttttttttgcctgtaaatgtattttattttgtaagtgacaatcaaaatatatttgngctactgattttttcaaatattaaatgggatcttaacaaaatttgtccactttgatgtattcatgtataactttanaatctgcaaagaccctgactaaagaaacagaagtaattgcacaactganactgaaggngttacagngctgcaaatgatgccanatgtcttacatttagccaagtacaccttcanaggtcccttgattttgagcattaggaacaacagaggaatatacnctgaaggcatcattaatagcgtttttcgttgctttattt

SEQ ID NO: 1183 - DNA, 546 bp, Homo sapiens
aaaatttttgctataacatttctgagccaaaggcagagggtatccattaacttcattgttgccttaattgaggggtgggtggcaatgccaagggtgggaacacaaggaagaaagaaatattaacgtcagctaagaaatcaacatgttatcaggctatactgtagttggttgcttctgtgttactggacatgacaaatgatctggtaaatgatgttaaattggcttgaaacaagagagtctcccaattcttagccacggtttcagtcagccctggatgaaagatggaaaaatttgacatatatctcataaagggaatttgttgcttccatggagattatagatggaggttactgaggaattaggtagctgggtggcttactccaggcatcccttagtaggtaacacttgagaaaagaaaaaaatcaggaagtcagggaaataattcaaaggcatttgtgagctctgagcagatatagcaatttaagtcccacagaagaggtgagaggagaaacatttggaggagaaaagggatatgataaatggggc

SEQ ID NO: 1184 - DNA, 238 bp, Homo sapiens
ccagtcactgagcacctggcagatactggttttccatcttctcacactcagctctgcccaaggtgggatttttgtctttcaaggcaggagccatcgtcccacccaggatgagccatcctcttctgggctaggttagagttgcctgttatgccaaagaatggagctgggctggagggaggggcaggtggtgatgggggaagagaagcagggtctcagcccaacctcagtaccaggtcag

SEQ ID NO: 1185 - DNA, 604 bp, Homo sapiens
  misc_feature 564: n = A,T,C or G
ctgactcatgtgaaaaaggcactatgaaaattaatgaatctagataatttctctaaatgatttatgttaaaatatacgacattcttacataacatctgttttatatatgtgaaataatataacatttaatgacaaaaattgtgtttccaaaaataacatttgttgaaggttaggtatctttcttttctctatgtggaatctttcacaggattaaaatatgtgtaaattaagtgcttcttattaccagaaatacttgacacagataaatacataaaatggccccacttccttttaactactcatatcaacattcagaactgaggctttcattaagcaaaatactgtaatgcacaccaatgcagactacttcctttgctagattttgagaagacatgacctctttcgcatttgtgctttctcatatataagaacacagtatacataataagcagaatataaactaaatcaaaatacaagctatacaaggagttgcaatcaacagagccatgacaaactgtcttgagaatgctccatagatttatatttgcatgtccaaggtatggntgtactttacagttcattcaaatgttttaattttttttac

SEQ ID NO: 1186 - DNA, 371 bp, Homo sapiens
aaatcatttatctggatttttatgttttattagcattttcaagaagacggattatctagagaataatcatatatatgcatacgtaaaaatggaccacagtgacttatttgtagttgttagttgccctgctacctagtttgttagtgcatttgagcacacattttaattttcctctaattaaaatgtgcagtattttcagtgtcaaatatatttaactatttagagaatgatttccacctttatgttttaatatcctaggcatctgctgtaataatattttagaaaatgtttggaatttaagaaataacttgtgttactaatttgtataacccatatctgtgcaatggaatataaatatcacaaagttgttt

SEQ ID NO: 1187 - DNA, 505 bp, Homo sapiens
aaattcttgcagattacatgtttttacagtggcctgctattgaggaaaggtattcttctatacaacttgttttaacctttgagaacattgacagaaattatgcaatggtttgttgagatacggacttgatggtgctgtttaatcagtttgcttccaaagtggcctactcaagaggccctaagactggtagaaattaaaaggatttcaaaaactttctattcctttcttaaacctaccagcaaactaggattgtgatagcaatgaatggtatgatgaagaaagtttgaccaaatttgtttttttgttgttgttgttgttttgaatttgaaatcattcttattccctttaagaatgtttatgtatgagtgtgaagatgctagcgaacctatgctcagatattcatcgtaagtctcccttcacctgttacagagtttcagatcggtcactgatagtatgtatttctttagtaagaatgtgttaaaattacaatgatcttttacctcgg

SEQ ID NO: 1188 - DNA, 481 bp, Homo sapiens
ctgtacgattatttgtcaaacagaaaacactgatacttaacaatgctaatgcaattatttatttgcttttcagtctctacaaaacgttctaaaacactaatctaaatattaacagtaaaatatttgcataactaatggaaactaagaaatcatatgaccaatatttcacttattggtaatcttactctactgatttccccccagactgtgatttttgaacttccttgcctttctcctgtctttctgtgtttattcatggaattccagttatctgggcttgaaattgcaggctctcctaacttaagcaaaatctgacagatcagcaaaatgagataaatgtttcttttttctttctgactgcattaaatcagatacaactcagcattaaaaagctatctttgtaaatgttgttactaataaattagtcttataagatccctggactttggagttgttgcaatgtctttgagagtaattcttt

SEQ ID NO: 1189 - DNA, 420 bp, Homo sapiens
aaactcaatgcaatacaaatcctttttattgtaaaagctgagttgaaactaaaagatctataaaaactgttacttttggccttaaacagtaccaactcttatgatcaaaaaaggccacaacagttaagattgtattacttgattttattttacactaggtggtgggcagacaaagtaatccttaataaagttgacaattagcttcactcaatatttttaataatgcacattaaaaaaaagtattcatcttacaaattcttctgcaatccaaacatacaatagcttggagaacatttagaaaacaaaagccaatgtaaaaagacagattaaaacaactagaacagtacaggttttatttatatggctcgaattttacagttttcttactgcatcatcaatgtcagaaatctgttccttcag

SEQ ID NO: 1190 - DNA, 265 bp, Homo sapiens
cctgcagggctcggccgtaggagaaggtcagggcccagggcttcagcagggggcacttgttaatggcattgaggttgatggacgcctcctcctcactctggcctccagacaggaaggtgatcccagtgacagcggggggcactgtgcggcgcagcgctgtgacggtcgccatggcaatctcctcatgagaaaacttctgagtacaagcatggcctggggtgaccatgttgggcttcagcaaggtgccttccaggtagatgtggtg

SEQ ID NO: 1191 - DNA, 461 bp, Homo sapiens
gtgcagtggctcacgcctgtaatcccagcactttgggaggccgaggtgggtagatcacctgaggtcaggagctcgagatcagcctgaccaacatggtgaaaccctgtctctactaaaaatacaaaaaattagctgggcgtggtggcgcacacctgtaatcccagctactcaggaggctgaggcaggagaatcacctgaacctgggaggcagaggttgcagtgagctgagattgcaccattgcactccaggttgggcaacaagaacgaaactccatctcaaaaaaataaaacaaaataaatgccagtttttctgtgtgtattatatttaatatgcattgcattttgaaatatttttttaattgtacaggtaacacacgctgattggtaaaatatcttgcaatctgcaagacacataggcataatctttcacatcataatctcctctccaaaggagctacttt

SEQ ID NO: 1192 - DNA, 562 bp, Homo sapiens
cctattgatacctcatcctcctcctgagcctcctttttgcagtataggttattatggtattcatgggtgaaaggaccaaggtaaggagggtccctgtatgagttagggtttatttttaataaggtgagaaataagataacttctccaaaggaaatgaagataacaatagctaacgtttgctgtgtgtttactgtataacaagccaaattaagcaaatacacatcacattaaccctcttgttttaacccatgagggaggtgctgttaggaacccatttgactagccgataatctacttcagtgataggaccttgtcgttagggtactgactattaatcttgttttggcagaaagaaacaacctatgttcagaatgaacttttaggttcctgtttatattccataaaggatgtgcctaaaactcaaacttcatttagcctcaacattatttagctaattatgacattgtccatttgattccagcaaaagaaaatccaaattcattcctgttattggtaaattcccataaccagcaattacaaaagcttcaaacaactgttgttt

SEQ ID NO: 1193 - DNA, 488 bp, Homo sapiens
ctgatgccatcaaagaggtcttcgacaataaattccacatcatcggcgcagtgggcatcggcattgccgtggtcatgatatttggcatgatcttcagtatgatcttgtgctgtgctatccgcaggaaccgcgagatggtctagagtcagcttacatccctgagcaggaaagtttacccatgaagattggtgggattttttgtttgtttgttttgttttgtttgttgtttgttgtttgtttttttgccactaattttagtattcattctgcattgctagataaaagctgaagttactttatgtttgtcttttaatgcttcattcaatattgacatttgtagttgagcggggggtttggtttgctttggtttatattttttcagttgtttgtttttgcttgttatattaagcagaaatcctgcaatgaaaggtactatatttgctagactctagacaagatattgtacataaaagaatttttttgtcttt

SEQ ID NO: 1194 - DNA, 607 bp, Homo sapiens
  misc_feature 507, 508: n = A,T,C or G
ctggatgaccagagtgctgaaacccacagccacaagcagtccagattatataagcggaaagctaatgatgagagcaatgagcattccgatgtgattgatagtcaggaactttccaaagtcagccgtgaattccacagccatgaatttcacagccatgaagatatgctggttgtagaccccaaaagtaaggaagaagataaacacctgaaatttcgtatttctcatgaattagatagtgcatcttctgaggtcaattaaaaggagaaaaaatacaatttctcactttgcatttagtcaaaagaaaaaatgctttatagcaaaatgaaagagaacatgaaatgcttctttctcagtttattggttgaatgtgtatctatttgagtctggaaataactgatgtgtttgataattagtttagtttgtggcttcatggaaactccctgtaaactaaaagcttcagggttatgtctatgttcattctatagaagaaatgcaaactatcactgnnttttaatatttgttattctctcatgaatagaaatttatgtagaagcaaacaaaatacttttacccacttaaaaagagaatataacattttatgtcacta

SEQ ID NO: 1195 - DNA, 312 bp, Homo sapiens
gttatctatttttataaccacctgtggtccattgttcattttaattcacatttcttatgaagtatggtaacagggagggagacacctagattagcagctcaatttgtactacttcagccaatctgtgaatgtaaaaactacactgttgccttgctaggatccaccctcctataatatggaacaaatatctgaatgaaatccaccctaggagacggagtcaaactaaacttgtggtttttcatttaacttttgactacagcatggccccatggcatccacaccaagagggtgttgtgatgaggtgccatgctg

SEQ ID NO: 1196 - DNA, 242 bp, Homo sapiens
aaacaacaagacgcttgacttgaagggaaaactatctaggattcttttttgttttagagtaatttatccctacttaaagacagattgccctacatgtaacagctacgtacaaaaaagttataaaattgtccttggttttacaatgataaatgaaaaacattaaaattctccaattgaacaaggtatgcaaggatttttatgttgttgtttttttttttttgttaaaacagtgagagcaaaat

SEQ ID NO: 1197 - DNA, 536 bp, Homo sapiens
  misc_feature 494: n = A,T,C or G
aaaatgtggcaattgggaagtacagtacatgcttccctgtggcttgggggtgtgtagttggggccctaattcttgagccagtcaagagacacttgggatttagccctcaattgcagcactgaggcactggtgccgagaaacaatcctgagggggtccccaacccacctagtcactccttagtttgcagaggcactatctgcagagtcctgtgaaaggctgcagtgaagtcttgcatgagactccccatccagcggagttctccaagctgcagggtagagcgttgtgccaggagggtgtttgggctcatgaaacagtggagagacgcagaggctcactgggaaaccttggcctcaccgggcctggattgggcatcggcagtgggcatgaagtgggggtgggattctttaggccagggtccaggacacttgggggatcgtaatgctgggggttttcggggaggaaccaagggctcacggagcctcctgtgctgcantggctgggccataggtgcacatggctcaccgagccacctgcc

SEQ ID NO: 1198 - DNA, 202 bp, Homo sapiens
ccttctaggtgagacacttttaaggtacactgcattttgcaaaaaaaaaaaaaaaaaagtaatcttttagcaaccccagtattccttcactatttcgcttcctgcattagcaaattttacttacagtcaaaagtgcagatttatactcctgacgtgtctcattcacagctaaataataggccataggacttttggtaggttt

SEQ ID NO: 1199 - DNA, 515 bp, Homo sapiens
  misc_feature 504: n = A,T,C or G
ccaacatggtgaaaccctgtctctactaaaaatataaaaattagctgggcatggtggtgtgtacctgtaatcccagtactcaggaggctgagacgcaagaatagcttgggcctgggaggcagaggttgaagcgagccgagattgtgccactgcactccagcctgggtgacagagtgagactgtctcaaaaaaaaaaaaaaaaaaaaattttttttttcatttttttcaatatacaatctgaaatgatcttttaagtttatatgctctgatttttttttttaatctaaaagaaatcaggaccaggtgcaatggctcatgcctataatccctacactttgggaggctgaggaggattacttgagcccaggaggtcgaggctacagtgacctataatcagctttgggcagtggcagtatcatagccagtaaggtttatccgaggcacaattattactgattattgccaattgaaacagtgagttatgatcatgccactgcactccanctttgggtgac

SEQ ID NO: 1200 - DNA, 567 bp, Homo sapiens
  misc_feature 92: n = A,T,C or G
ttttttttttttttttttgaaaaagtcatggaggccatggggttggcttgaaaccagctttggggggttcgattccttccttttttgtctanattttatgtatacgggttctttgaatgtgtggtagggtggggggcatccatatagtcactccaggtttatggagggttcttctactattaggacttttcgcttcgaagcgaaggcttctcaaatcatgaaaattattaatattactgctgttagagaaatgaatgagcctacagatgataggatgtttcatgtggtgtatgcatcggggtagtccgagtaacgtcggggcattccggataggccgagaaagtgttgtgggaagaaagttagatttacgccgatgaatatgatagtgaaatggattttggcgtaggtttggtctagggtgtagcctgagaataggggaaatcagtgaatgaagcctcctatgatggcaaatacagctcctattgataggacatagtgggaagtgagctacaacgtagtacgtgtcgtgtagtacgatgtctagtgatgagtttgctaatacaacct

SEQ ID NO: 1201 - DNA, 211 bp, Homo sapiens
ccagcaaaacagtgcagcagacttgtccatgctggtcctggagtccctggagaaggcggaagtggaggtggctgacgagctgctggaaaatctggctaaagtgttcagcctgatggaccccaactctcctgagcgcgtgacctttgtgtccagagccctgaagtggtccagtgggggctccgggaagctgggccacccccggctgcaccag

SEQ ID NO: 1202 - DNA, 580 bp, Homo sapiens
ccagttcgtttctcactgttttggaaagccctgtgtgccaaaccaaggacgtgtctttcagggaaaggttaattttccgaagtttattaaaatagaacttggaaaaccaagcattttgaatttattccagtcctctgggcatcattcctatttcttctgccatgtcaaggagaaattccaagcctgcattctgtcatgctaaaataaccagcccatacttctcggtgaccttctgttgaacgtacctgagcctgcaaatgtaaaaatgattgtatctgaatttgcactaatggtgtctgagagcaaaaagagtgtgacctctattggaaacctttgttcaaattcaataattcagagatgctacatacttctgcaagcttcctgattatgttcactgtaatattaatgacctaagtttgaatgtatttccttacagtccattaatttgacatccatcttttacctggggattattacaattgcaataagtcattaatgttttcttcacacagcttcttaaaccaagtttctctgcagctctttcggttctgcttacagtgtgcgggaaatctgatttttt

SEQ ID NO: 1203 - DNA, 427 bp, Homo sapiens
  misc_feature 132: n = A,T,C or G
ccaatgtggcgaaacgctgtctctactaaaactacaaaaattagctgggcgtggtggcgcgtgcctgtaatcccagctactcggcaggctgaggcaggagaatcgcttgaactggggaggtggaggttgcantgagccgagatcacaccactgcattccagcctgggtgacagagggagactccgtctctaaaaaacaaccccccccccaaaaaaaaatgcatagcaagctgtaatgctctttgtgttttagaatagtagaggtctggaaagttgtttgcttttccccagttttttttgctgtgttacctctgaagggaattgaggtagaggggagagttagaaggaatattcggcttttctattttatatcctcctaggtgaaatttttacaacaaacatgtactggtgtattttgaaatgttttt

SEQ ID NO: 1204 - DNA, 386 bp, Homo sapiens
gacagggtgaagaaagcccagtgtaaaaatgaatcgcgttttaagtgattcggttaaagagtttgggctcccgtagcaaactaatactagataataaggaaatgggggtgaaatatttttttattgttgaatcattttgtgaatgtccccctcaaaaaaagctaatggaatatttggcataaagggcatttggtggttttatttttgtttgagggggattgtcagaaaatcccttttctctcttacgtctaactgactagggaacaattgttgatatgcatagcattggaatacttgtcattatatactcttacaaataacacatgaagcaagaatgaccaatattctgataattggcactggatcacaaaatgtgataaaacttt

SEQ ID NO: 1205 - DNA, 105 bp, Homo sapiens
aaatctgggtattggtgttttttcttttttcctctttccttcttaactcaagacttgtagtgttgtaaacctgcctcacaaaatacatggtaataacttttcttt

SEQ ID NO: 1206 - DNA, 560 bp, Homo sapiens
  misc_feature 314, 344, 376, 448, 450, 461, 509, 541: n = A,T,C or G
ccacagtagtcttgatgaccaaagtcctttttttccatctttagaaaactacatgggaacaaacagatcgaacagttttgaagctactgtgtgtgtgaatgaacactcttttgctttattccagaatgctgtacatctattttggattgtatattgtgtttgtgtatttacgctttgattcatagtaacttcttatggaattgatttgcattgaacacaaactgtaaataaaaagaaatggctgaaagagcaaaaaaaaaaaaaataaaaaaaaaaaaaaaaaaaaaaaaagcttgtccacaggggaaggcaanaggcgatagctgggggtcacttgtcactanatggaagctccttggtccacacagtcccaaanaaaggtctgcccttgggcccacgaaacccatcccagccctcacaggctgaacctcaccctgggttttcccananaggtgcccaanaagacccaagctgccccaagtcagaggagcagcaggaaacagcctcanaagtccgtcactcttcagtactcctcccttanaatgtccacttcctgtttg

SEQ ID NO: 1207 - DNA, 231 bp, Homo sapiens
ctctgctcggccgcgggctcccggaggactgcaggcaggatgacgcaaaacacggtgattgtgaatggagttgctatggcctctaggccatcccagcccacccacgtcaacgtccacatccaccaggagtcagctttgacacaactactgaaagctggaggttctctgaagaagtttctttttcaccctggggacactgtgccttccgcagccaggattggttatgagcag

SEQ ID NO: 1208 - DNA, 543 bp, Homo sapiens
  misc_feature 502: n = A,T,C or G
gcagcctaaaaggacctatgtcctcacaccattgaaaccactagttctgtccccccaggagacctggttgtgtgtgtgtgagtggttgaccttcctccatcccctggtccttcccttcccttcccgaggcacagagagacagggcaggatccacgtgcccattgtggaggcagagaaaagagaaagtgttttatatacggtacttatttaatatccctttttaattagaaattaaaacagttaatttaattaaagagtagggttttttttcagtattcttggttaatatttaatttcaactatttatgagatgtatcttttgctctctcttgctctcttatttgtaccggtttttgtatataaaattcatgtttccaatctctctctccctgatcggtgacagtcactagcttatcttgaacagatatttaattttgctaacactcagctctgccctccccgatcccctggctccccagcacacattcctttgaaataaggnttcaatatacatctacatactatatatatatttggcaactt

SEQ ID NO: 1209 - DNA, 360 bp, Homo sapiens
ataatttccttattcagtttcagaagaaaaagaatgaaattgggtaactgtcattgcgttagctttatgttgaattgggaaattgtggcataaagcttaaattcgtgtttatcaaatgtgaaccatagtagtataatgctgctttgtatataatgtaagtgctacaaatagtctcagcactgaaaatgtattgatacctcttaaatgaatgcaacttttgatgtaggtgttttgctatgcctcagaaaatatctgtctgagaatttgttaatctgtttgataatgaagatacttcctgttttcttgtttcatattttcatgttcaaaatttaagttttacatttttactactgttaattt

SEQ ID NO: 1210 - DNA, 362 bp, Homo sapiens
gcgtggtggcgggcgcctgtagtcccagctaccaggaggctgaggcaggagaatggcgtgaacccggaggtggcgcttgcagtgagccgagatcgtgccactgcactccagcctgggtgacagagcgagactccaactcaaaaacaaaacaaaacaaaacaaaaaaacactccagaccagacaggaaatacaggtgttgggacggctggcaaaatttcagcagcacctgtgaattatgtggtaggattgtaccacagctaattttctgatctaaaaggttgtatgctggctaggtaggagagtggttttgttttgggaagatatgtaatggaacattaaaggataatgggccattacatcag

SEQ ID NO: 1211 - DNA, 437 bp, Homo sapiens
  misc_feature 78, 103: n = A,T,C or G
aaaaatatcacaaagtatatatccataatatatgttgctattcacacaattctttaagcaatattcaagtatatttgngctttatatttttacattactttanaacctatttttagctttcaataaaactatgtatctccaaagatttctcaaatatttaataaatgaggcaaaacaatcatgaaaatataaactgctactatagatttttcatctttcattttatgcatttcctctcaaccatgtaatttcctgttaaggaatgttgataaatttttatctttataatatcaatattgctgctttctcagcctggtgcaacagtcaagacatcacaaggtttctgaacacgcagtattcactctgccatataagttggagcaataaaatctgataggactggtattcatcatttccagttatttcaactgcaggac

SEQ ID NO: 1212 - DNA, 341 bp, Homo sapiens
  misc_feature 107, 124: n = A,T,C or G
gttaattttaacaactgaagtcttattgttgaaacttattttcaacaaaactgtgcagttaaatttgtatacgtattcacatactgaaagatgaaccgttaaaatancacttaattttgtgttncttcaatatgtcttgatatactttgtgcaattaatattacacatgtaagttgtatggcagtttacagaactcaatgacttgtcatgaggttttcatatgagctacacattgtgtacattgattgttttttatttttacataaatccattctgtcattttcaactttatatataaatctccaatgttatgggaaacaatagattgacacataattttt

SEQ ID NO: 1213 - DNA, 455 bp, Homo sapiens
aaagaacagctctttgaaattgaaattgaccctttttgcttgaccttaaggagattagcttccagtagatgagtttgcaaaatacttttcctgttcttttgttttgctggtattgaaaacatcccactaaatcagatgaagaggcatgggaggaaaaatatccaaattaattactaaaatcgagaagagaaggcaaactcttgaaaagtaaaaaggtgtttgtgaccttcagtatttattgaacagaggaaataactgacaagggcaatacaattcaatgttcatgtagtaacattcatgtcacttgttgaatttggttctcatatgtatattgcatacacataaattcaaactataagtcgtcatttttgagccatcatcttacattcatgtaatgaaattatggaagagagtaaaaactagctcttaacttagtaaatataatatggtattta

SEQ ID NO: 1214 - DNA, 428 bp, Homo sapiens
ctggcctagagcctgacactctcctaagaggttctctccaagcccccaaatagctccaggcgccctcggccgcccatcatggttaattctgtccaacaaacacacacgggtagattgctggcctgttgtaggtggtagggacacagatgaccgacctggtcactcctcctgccaacattcagtctggtatgtgaggcgtgcgtgaagcaagaactcctggagctacagggacagggggccatcattcctgcctgggaatcctggaagacttcctgcaggagtcagcgttcaatcttgaccttgaagatgggaaggatgttctttttacgtaccaattcttttgtcttttgatattaaaaagaagtacatgttcattgtagagaatttggaaactgtagaagagaatcaagaagaaaaataaaaatcag

SEQ ID NO: 1215 - DNA, 144 bp, Homo sapiens
ctttactctcgccggccgcgcgaacccgtttgagctcggtatcctagtgcacacgccttgcaagcgacggcgccatgagtctgacttccagttccagcgtacgagttgaatggatcgcagcagttaccattgctgctgggacag

SEQ ID NO: 1216 - DNA, 300 bp, Homo sapiens
ggcgaattgtggatgactgtggtggggcctttacgatgggtaccattggtggtggtatctttcaagcaatcaaaggttttcgcaattctccagtgggagtaaaccacagactacgagggagtttgacagctattaaaaccagggctccacagttaggaggtagctttgcagtttggggagggctgttttccatgattgactgtagtatggttcaagtcagaggaaaggaagatccctggaactccatcacaagtggtgccttaacgggagccatactggcagcaagaaatggaccagtgg

SEQ ID NO: 1217 - DNA, 343 bp, Homo sapiens; identical to SEQ ID NO: 182

SEQ ID NO: 1218 - DNA, 479 bp, Homo sapiens
  misc_feature 55: n = A,T,C or G
ctgtcctctgttactcagatacagttccaaaactaagcgattatataagcacatncatattttagggctactctaagttaaaaaccttttctcttgtttcagagttatttacatcaaattaagacatttacaaattgttcatagtatacaatagcccaaatatgattttcacctatgctgtgtaaagaagttaagcattcgtaagtttgtctaataaattcagtgcacttttttccataacacgagctattctaaatgttttacatttctttcagtgcatatttccaaattcattaaacagaatgaaatcaatgttattaaatggctatatcataatattcaagcatattatggaatctataccacagtgggattcacgtcaatactataattcactctagaaaaacatcacaggcacacacaaaataaagaacaaaatttgatttttttttataaatgtaaagtatactatctacttt

SEQ ID NO: 1219 - DNA, 515 bp, Homo sapiens
  misc_feature 511: n = A,T,C or G
aaattagagatctgcttacttaagtctcagtcaattaaagccatctcttggaattgacagtatacttcctacatgggtactgaggtcttaattctggaaggaaaatactgaaggcaaatcaaaaataactaattccaaccaactagggttaatgctatccttaaaaatgtaactaaaagaagtcccattatccactccaaataattccccaccttgattccagcaaatacttcctgatttactagtaaagcaaagggacaaaaaaagctattaaggccagcatattttgaatgaaaaattggagcatttctgctcagctacctctgtggttatctctagtaacgaaataaccattatctagcgtacctaaaaggttggaatttataatgtgcattaaaaaaacatttaactgtaatatcagaaagacaatgttactagttaccttgtaaaataagtcccagtgaactgatattctgcagaatcttcactgttatatactaaagacaaaggnagac

SEQ ID NO: 1220 - DNA, 278 bp, Homo sapiens; identical to SEQ ID NO: 614

SEQ ID NO: 1221 - DNA, 580 bp, Homo sapiens
ctgcctcctgttcattgttcttgtgttctttgccttattcatcatttttaaggcttatctaattaactgtgtttggaactgctataaatacatcaacaaccgaaacgtgccggagattgctgtgtaccctgcctttgaagcacctcctcagtacgttttgccaacctatgaaatggccgtgaaaatgcctgaaaaagaaccaccacctccttacttacctgcctgaagaaattctgcctttgacaataaatcctataccagctttttgtttgtttatgttacagaatgctgcaattcagggctcttcaaacttgtttgatataaaatatgttgtcttttgtttaagcatttattttcaaacactaaggagctttttgacatctgttaaacgtctttttgtttttttgttaagtcttttacattttaatagtttttgaagacaatctaggttaagcaagagcaaagtgccattgtttgcctttaattggggggtgggaagggaaagagggtacttgccacatagtttcccttttaactgcactttctttatataatcgtttgcattttgttacttgctacc

SEQ ID NO: 1222 - DNA, 392 bp, Homo sapiens
aaaacaaaagagaaagtgaaagccattaggcaagctatgtgctgggctgctaacgtagcccctgcagggaggggtcaggagcgcgctgcagtgagccttgggtctcgcaggcccagccctgctgcaaggagccagggcacccaggaaacatcagcacacacacacacagggaccctcccttcatgtcacttgttttgctgccctaaatggcttcttgcaccctaacccctgatcctggaagaaggcagagaaactggcccgtacagagacctgcaattctacgcaagcttaacacaactatgagacagaagaggggcacgcagaagaggtgggcaaaagtggtcacaacggcgggggatgctttgaatactggatggtgtccagagccgctc

SEQ ID NO: 1223 - DNA, 445 bp, Homo sapiens
  misc_feature 373: n = A,T,C or G
cctcagaatgaggctgctttattggaagctattctgacatcactttccagactgtctcactgtcttgggaccaggcatgggaggcaggggtgggaatcttcttgtgattgtgggtggtggctggaggagtggagtggtgggaggcggctcagtcgcgggcactcctgcgactggcggatgcggtccggatggaataagccttcaggagcccaggacccgcactgctggagaagctcagggcattgctgcccatggttcccccgagggtcagcccaatgccaccgccactgctactgccaccagtggaattcatcacagagatattcacggctcccactccatctccagccaaccggctctcctcgccctccancagcttgcggtaggtggcgatctcgatgtccagggccagcttcacgctcatgagttcctggtactcacgcag

SEQ ID NO: 1224 - DNA, 189 bp, Homo sapiens
  misc_feature 108, 151, 180, 181, 182: n = A,T,C or G
ccactgctttgtatcagggtttttcacgcttttgtagaactgaggtttcaataaacagtttcagttgcaaaaaaaaaaaaaaaaaaaaaaaaaaaaaaaaaaaaaaanaaaaaaaaaaaaaaaaaaaaaaaaaaaaaaaaaaaaaaaaaancaaaaaaaaaaaaaaaaaaaaaaaaaaannnttgaaaa

SEQ ID NO: 1225 - DNA, 430 bp, Homo sapiens
aaaacaaagaatcagcatggggagtttaccggaatgaggactgaaacacttaggagttaaagcaattcaaggggcgtgtgtgtgtctctccctttctctgtcaatctctctcactctctctggctctctcacagacacagactcaaacacacacagccatatgtgtaatcattttttagtacaaaatattccctgtagccagacatttatcttcagaataatcacaccacattaaatcagtcttctcttttcagccctagtaaaagttttgtttaattctaagatgccatcatagtgaacaaccttaacttttatgctacataattatattcaaagctttatgtatttttgtttataattacacagtaattataaatgtttagtaccaacctgatgacaaacactattttgttgaaaaggttttgcattt

SEQ ID NO: 1226 - DNA, 313 bp, Homo sapiens
aaagaaatacagtaaaagcaaaaacatatgaagcataatttaatctgatgattcagaaggcacctcaagattgtgttgtgccgttttcctcatgctgcgtggttaggtgcctataacagaattctggttagtaaaattttgaaaaaaattcacatataattcacattaaacgactacagatagatacaatatgggcattttgatgtgtacatttgtacctgacttagggcacaatttataataatatactaagaaaactaaaattaattataaaatgagtatttttagcacacttagtaacagctacttgttt

SEQ ID NO: 1227 - DNA, 548 bp, Homo sapiens
aaaattatatcagattcgtttacttcgtttattattttacagtaaatttgaataaatcttaggggtcattatcacttaaataatactgtacctaggtctttcaaattaaaattatacctgaatgaagttgtttgtatacataaaggatatttgtgtacaattaccttttttcccccacacttgttttctttgtttttgttttttatggcaactggaaagtatttactatgggattcatttatgtctgtctttctatcataaagaattgatcaatatgtaaatatgtgatttgaaccatggttgacttacaagtgtcactacagctttttagaaaacatagccctaatatatgttaagcaggacccgggtgagccagtgggcttgcgctttatgtagagctggaagaaggccgtccatcctgtctcttgggcggacagtgtactttcctaatagggaagggaagcacaatggaaatacccctgaaccgttttattgcagtaatttttttcatatctgaaactattatttaatattttgaataagatttt

SEQ ID NO: 1228 - DNA, 470 bp, Homo sapiens; identical to SEQ ID NO: 163

SEQ ID NO: 1229 - DNA, 421 bp, Homo sapiens
aaatgcaaacaattcatttaccatttctttgttttagtgcatctgcattaaggctttgaattatttgacccaagattttacaatattaaaatctgactcaaaattttacaatgttaaaacaaataggtccacaaccatactacctactgtgtctcactgagtcagcatagagttaaagctcaacaccttaaggaaatggtagcagagacatttgctaatatctaagaagttacatatatagtttttaattaaaggatgtataataaaacaaatagcttagtggcaagaaattggtgctaataaacaaaaggtttttcaaaagaaattgtaacatctttggaaaactgtctggttctaagttcccacttcctttagttcccacggagttcatgcagatacatttcttaagacaatcttaaag

SEQ ID NO: 1230 - DNA, 349 bp, Homo sapiens
cacagtcatgatgggctctctcctggctgccaccactgaggcccctggtgaatacttcttttccgatgggatccggctaaagaaatatcgcggtatgggttctctcgatgccatggacaagcacctcagcagccagaacagatatttcagtgaagctgacaaaatcaaagtggcccagggagtgtctggtgctgtgcaggacaaagggttaatccacaaatttgtcccttacctgattgctggcatccaacactcatgccaggacattggtgccaagagcttgacccaagtccgagccatgatgtactctggggagcttaagtttgagaagagaacgtcctcagcccag

SEQ ID NO: 1231 - DNA, 365 bp, Homo sapiens
ccatgttcattatttatctatgtttattaatgggccaatgcaaaaaatcattttttcaaagaaaaatttgtccatgtaaagcttaaattataatattgctgctttgtataactcttctatgtttattctattcatttgttcctttccctaccatattttacacatgtatttataatctgtagtatttattacatttctgcttttttctagtcattcaatttatcactgctgaattgcatcagatcatggatgcatttttattatgaaaaaataaaatgacttttcaaattataatgagtaagttttggtctcaataaaataatgcaaacatttcgaaaaaaaaaaaaaaaaaaaaaaaaagcttg

SEQ ID NO: 1232 - DNA, 547 bp, Homo sapiens
aaataaataaatagctagactggtgactgattcttcagcaaaaatattttatgatccagcagattattcactgatttgacatagtctggctgtacccaggaatggagcctgcacggtgaatggctttgtatagaacctctttgtctacaccattatgtgcgctgataagcgttcatggaacgcgttgaaattgtaattatatctgaggaattctgtatagattagaattctgtatagattagagagtgttgaaacggatgatttctatgctgagtttgtgctggtgtatgtgtgaagtgagtgagttgggtgtattgtgcgctaaacttttctgatagaggaagcctgattaaagaatggtccgtgctaaggacttgttagatctagttcactctccatttaataattatatgctatttctatattttcattctcctatcacctgtcttgcctttttcattattttattatgaaacttgtgtaaatacaattttgtttctgtactttttggcataacataaatctgtgaacttgaaatttgaatttt

SEQ ID NO: 1233 - DNA, 343 bp, Homo sapiens
aaattaaatatttgaatataaaatagctctaagaaagaagcaaattatcactgaacatatttcttattatttctggctttgaattatacgtaacttaaattgtcttaaatgatacagaatattggggaatatgatactttcacataatatactatgaacctgttcatataactctgattgactactaacttctgttttatgtatttattaaagagctgacactgtagtttgtggtgagatgtttatttttctaacagagcttataacagttaggacaaggcatttaattaatgcatcattctgtttagtagtaggtgttaatcaatatgaaattctctgtttt

SEQ ID NO: 1234 - DNA, 523 bp, Homo sapiens
aaaaatatagggcagaaagccttttgggtgatatttatatattttcacacaatatttctaggtccctaaatgaatcatgaagcattatatagaaccaaaaaaatgtattttcttacattatctcttaatttaatttcataaatctctagtaaatattgtaggtagctacatttcagtatgagaattcacctcaacaggaagtctttatagagggcttaatcttcattagccatatattaccaagttcagacttatataatgaacgggtagttggcagacattcgctctgtaagacaaagcaatagcgttttttctccctaccaacaaaaaggcagagtccctacttttaacaaccagggcttttagaaaccacacagtatttcctggggtacatgaaataaaaaaaccatagggctggggagagcctagcctccccatttacactgagctgcttgatgaggcaaccctttcactcatgtaagtctctgctttatgatggcagtatcttacagtagacaagttt

SEQ ID NO: 1235 - DNA, 432 bp, Homo sapiens
  misc_feature 18, 65, 155, 281, 332, 354, 395, 404: n = A,T,C or G
gttttttaattctctgtnccttttgcaaacaattttaatgatggtgttaaagctgtacaccccangacagtttatcctgtctgaggagtaagtgtacaattgatcttttttaattcagtacaacccataatcatgtaaatgctcattttctttangacataaagagagccctagggtgctctgaatctgtacatgttcttgtcataaaatgcatactgttgatacaaaccactgtgaacattttttatttgagaattttgtttcaaagggattgctttttnctctcattgtcttgttatgtacaaactagtttttatagctatcaacattangagtaactttcaaccttgccancatcactggtatgatgtatatttaattaaagcacacttttncccgaccgnatacttaaaatgacaaagccattctttt

SEQ ID NO: 1236 - DNA, 602 bp, Homo sapiens
aaacattacccagcatcattgtttataatcagaaactctggtccttctgtctggtggcacttagagtcttttgtgccataatgcagcagtatggagggaggattttatggagaaatggggatagtcttcatgaccacaaataaataaaggaaaactaagctgcactgtgggttttgaaaaggttattatacttcttaacaattctttttttcagggacttttctagctgtatgactgttacttgaccttctttgaaaagcattcccaaaatgctctattttagatagtttaacattaaccaacataattttttttagatcgagtcagcataaatttctaagtcagcctctagtcgtggttcatctctttcacctgcattttatttggtgtttgtctgaagaaaggaaagaggaaagcaaatacgaattgtactatttgtaccaaatctttgggattcattggcaaataatttcagtgtggtgtattattaaatagaaaaaaaattttgtttcctaggttgaaggtctaattgatacgtttgacttatgatgaccatttatgcactttcaaatgaatttgctttcaaaataaatgaagagcag

SEQ ID NO: 1237 - DNA, 354 bp, Homo sapiens
ctggctccccagcacacattcctttgaaataaggtttcaatatacatctacatactatatatatatttggcaacttgtatttgtgtgtatatatatatatatatatgtttatgtatatatgtgattctgataaaatagacattgctattctgttttttatatgtaaaaacaaaacaagaaaaaatagagaattctacatactaaatctctctccttttttaattttaatatttgttatcatttatttattggtgctactgtttatccgtaataattgtggggaaaagatattaacatcacgtctttgtctctagtgcagtttttcgagatattccgtagtacatatttattttt

SEQ ID NO: 1238 - DNA, 338 bp, Homo sapiens
aaaaaatggtaatgaaaatggaatgcagctactgcagctaataaaaaattttagatagcaattgttacaaccatatgcctttatagctagacattagaattatgatagcatgagtttatacattctattatttttcctccctttctcatgtttttataaataggtaataaaaaatgttttgcctgccaattgaatgatttcgtagctgaagtagaaacatttaggtttctgtagcattaaattgtgaagacaactggagtggtacttactgaagaaactctctgtatgtcctagaataagaagcaatgatgtgctgcttctgatttttcttgcatttt

SEQ ID NO: 1239 - DNA, 458 bp, Homo sapiens
gctactggagaggatgatgatgatgaagttccagatcttgtggagaattttgatgaggcttccaagaatgaggcaaactgaattgagtcaacttctgaagataaaacctgaagaagttactgggagctgctattttatattatgactgctttttaagaaatttttgtttatggatctgataaaatctagatctctaatatttttaagcccaagccccttggacactgcagctcttttcagtttttgcttatacacaattcattctttgcagctaattaagccgaagaagcctgggaatcaagtttgaaacaaagattaataaagttctttgcctagtatacagttttatttttttatttcattgacaccgatctgtacacagtaaaaaaaattgcttatagaaagctaatcatggcatgtaatatggctgataacctttggaatttgattaaagattt

SEQ ID NO: 1240 - DNA, 565 bp, Homo sapiens
  misc_feature 498: n = A,T,C or G
acagaagttgtttggaccttagagccattgtccacaatcacggatggttctcaagagttgattgtaagaaatttccaaagaaggctgcctgcatagtggttccggctgccctttctaggtgattggaatcagcccatctaaagcagtctttatatgcattccgaggccagagtaacattttgaactttggggggatatttgttcatcacttgggtagaagaggagcaaaaatacctctgttttctcttgccaaagtaagatgaagctattccaggttgagggatttttctttgcacggggttgattaatttctgcacagggagtgagattattaaagtaacacacacacaaagtaaattgcaaaatgaaaaaaattagaagcaaatgagttttgggccaatattgttgataaatctaaattgttaagagagatcttataatgcaacatcaaattctttattcaattttactgaagtactggctctttcctgctctggnacaagaattgagcaacttgtctgatgactgggaaaggaggacctgcaaccatctgacttggtctctg

SEQ ID NO: 1241 - DNA, 403 bp, Homo sapiens
  misc_feature 8: n = A,T,C or G
aaactcanatgtatatttagcatgctaaaaagtgaaaaaaatttcaactgaagttctgtggctcatcagttcaaatgtttcatggcattttttttctttaagtgaaaaattttgatactgtaaaacagttttgcataataaatgcaaaaagataacattttctaaatttttagaaagaatattcacattcattttgtcatgggtttcacgtggctcttctaaatatattaatcatattaataagacactggtcctatacaatttcaacagtccatcttcaattaaaaactaacaaaaataaacagtatgtaaagagtaacaaaaagtaaattaaatatactaaactcacacaacaggtagaataaaatgaaaccaaattacataatggcaggttatacatttt

SEQ ID NO: 1242 - DNA, 295 bp, Homo sapiens
gacggttgaaactagagatggacaggttatcaacgaaacttctcagcatcacgatgaccttgaataaaaattgcacacactcagtgcagcaatatattaccagcaagaataaaaaagaaatccatatcttaaagaaacagctttcaagtgcctttctgcagtttttcaggagcgcaagatagatttggaataggaataagctctagttcttaacaaccgacactcctacaagatttagaaaaaagtttacaacataatctagtttacagaaaaatcttgtgctagaatacttttt

SEQ ID NO: 1243 - DNA, 518 bp, Homo sapiens
aaagtgatctcagaggggcccatggattaacgccctcatcccaaggtccgtcccatgacataacactccacacccgccccagccaacttcatgggtcactttttctggaaaataatgatctgtacagacaggacagaatgaaactcctgcgggtctttggcctgaaagttgggaatggttgggggagagaagggcagcagcttattggtggtcttttcaccattggcagaaacagtgagagctgtgtggtgcagaaatccagaaatgaggtgtagggaattttgcctgccttcctgcagacctgagctagctttggaatgaggttaaagtgtcagggacgttgcctgagcccaaatgtgcagtgtggtctgggcaggcagacctttaggttttgctgcttagtcctgaggaagtgggagagttgaccgttttcatcctggcctccttttgctgtttggatgtttccacgggtctcacttataccaaagggaaaactcttcattaaagtccgtatttct

SEQ ID NO: 1244 - DNA, 475 bp, Homo sapiens
aaaagtaccccccaacacgcacaaattgggaatgaaatatgtaattatagccatctttatatgaaatatccaaacaacaaatatatttaataatataaagatagtgccaaaatcaacaaaagctaagaatactgaggcttaactgaccccgattcgtatgattttgaaataaaatgttcagactttctagctttatcttaatttgcctttgcttcactgctttatgtagttataatgtaaatctaagagatgcttaaaacagattaaaataatattgttaaaaaacatttttcttatctgagaaaatacaatataatcatatctccctcaaaatactcctgataacattagaaagttctgaagtgtttaatcatatataatgccaccattatcacatgaattcagaactgttacctgaatatttaataaaaaattaagttccatgaggatcataggtctctaaaagctacaattt

SEQ ID NO: 1245 - DNA, 269 bp, Homo sapiens
  misc_feature 258: n = A,T,C or G
ctggtcatgggccccgcgggcagcgggaagagcacctactgtgccaccatggtccagcactgtgaagccctcaaccggtctgtccaagttgtaaacctggatccagcagcagaacacttcaactactccgtgatggctgacatccgggaactgatcgaggtggatgatgtaatggaggatgattctctgcgattcggtcccaacggaggattggtattttgcatggagtactttgccaataattttgactggctgganaactgtcttgg

SEQ ID NO: 1246 - DNA, 460 bp, Homo sapiens
aaataccactaaaggcagggaggtaaagtgttgtagggtgcttaaaatatactaagaagggatttggcaattttccattcacagtatttccaatataaaagactcatcctatttatcaaactcacaaaagttgggggaaaatatcacttgggaaaaaatttcactgaattgctatcaaaggaagcaatgaagttacttgacaaactattgacaggatgtctagttcaaaatagaatcttcattgaggctaactgtagcacagtatgtgatacataaacaaaattcaaatattaaaattctaaataaaaaaattttccccgctagtataaagtagaagttctatagtggaaataacaatgaaaacagatgaaaaatcagtgaagaaatagagggaggtactactaaaattttgtgcttgagaggaaaaagggaaaggtaaaaaataattctgggaatattt

SEQ ID NO: 1247 - DNA, 322 bp, Homo sapiens
agtatatgttttcaaattgccattgctactattgcttgtcggtgttattttattttattgtttttgactttggaagagatgaactgtgtatttaacttaagctattgctcttaaaaccagggagtcagaatatatttgtaagttaaatcattggtgctaataataaatgtggattttgtattaaaatatatagaagcaatttctgtttacatgtccttgcttctatatatttgtaagttaaatcattggtgctaataataaatgtggattttgtattaaaatatatagaagcaatttctgtttacatgtccttgctactttt

SEQ ID NO: 1248 - DNA, 234 bp, Homo sapiens
tcactgagcacctggcagatactggttttccatcttctcacactcagctctgcccaaggtgggatttttgtctctcaaggcaggagccatcgtcccaaccaggatgagccatcctcttctgggctaggttaaagttgcctgttatgccaaagaatggagctggactggagggaggggcaggtggtgatgggggaagagaagcagggtctcagcccaacctcagtaccagggcag

SEQ ID NO: 1249 - DNA, 363 bp, Homo sapiens; identical to SEQ ID NO: 1060

SEQ ID NO: 1250 - DNA, 363 bp, Homo sapiens; identical to SEQ ID NO: 1060

SEQ ID NO: 1251 - DNA, 436 bp, Homo sapiens
tttacaaaaaagtactgaaacaactttgtcacttaggactattctcaggaaggagtgctttgttaagaacagagccatgattgacaaagtcagaagccttctagaaagtctttatttttctgttatgaataattgcattttctaattatcccaaatgattttataaattccgtaacttttatatgcctgcctgggatccatgaaataaaagtattccttaccaaaagagaagcatcagatacactgaaaggctcaatgttttatattttcagaaataaaagtgactgtatacccttttattaactatatggtagcttggtaaaatttttatagaatttttaatgatctatggtgttctatgatgaggcaacattccaccaaattagccttccaaaagttgcagtatcatgtataattatgacagcagttttgtttt

SEQ ID NO: 1252 - DNA, 106 bp, Homo sapiens
ctggatgcactacaaccagacagtggacatctggtctgtgggctgtatcatggcagagatgctgacagggaaaactctgttcaaggggaaagattacctggaccag

SEQ ID NO: 1253 - DNA, 251 bp, Homo sapiens
tttgttcctaggtgtaaaattttaatagttaatgcagaattctgtaatcattgaatcattagtggttaatgtttgaaaaagctcttgcaatcaagtctgtgatgtattaataatgccttatatattgtttgtagtcattttaagtagcatgagccatgtccctgtagtcggtagggggcagtcttgctttattcatcctccatctcaaaatgaacttggaattaaatattgtaagatatgtataatgctgg

SEQ ID NO: 1254 - DNA, 137 bp, Homo sapiens
aaaatgtggcaattgggaagtacagtacatgcttccctgtggcttgggggtgtgtagttggggccctaattcttgagccagtcaagagacacttgggatttagccctcaattgcagcactgaggcactggtgccgag

SEQ ID NO: 1255 - DNA, 322 bp, Homo sapiens
ttttttttttcgaaacagaaaaaaacaaaacactttattttccacaaggaagagcaataggaaaaattaaatcatttcccacatattgttttcttaaaacagagcctacaaggacatattcagcaccaaataaaaaaggaaaaaaagagaaattacaaacagccatagaatataatctataaagcaaacatttaatattgcactttgttttgctaacattttggattttacttttcctaattgaaaaatcaggaatctatcttgaatactggaatacaactgtgaacctcacatcttatgtcaggaattgaccaatattttt

SEQ ID NO: 1256 - DNA, 453 bp, Homo sapiens
aaaagcaaaaacagaataatttatttgaatccatctttccttgaaaaaaataaaaataagactttaatagtcatttccttaagtgttcacaagtcttctcaaaaatactactggtgattgaaaaaaaagagaaggcatagttttgtttttgtgacaaccatccttattactttgttgtacaaataacaagatagaaatttggaaataaaattgaaacataaatttagcattcttaacactaataaaaatttaataaaacaaagtctgctgaaaaatcgaacaatgtaaagtttccacatttgtaggtgagacaggatagtctcagtgttgatgatagtgaaagtgtagagtagaactaattgaggtttgtagagatatttcatacaaaacttacgaggaaacccctgtcactttcgttctccccgtcagcatgagaacgactctccactgagg

SEQ ID NO: 1257 - DNA, 177 bp, Homo sapiens
tccttgtggacaaggatgttattttagttataatgacaactttaatatctagcaaagtgccaggcatagagtattcctttattgaaatgaattgatagatattgattattaaaatgctactacagtattctacgatgcaggctgaatgtatattacagtaattctctggctaatttt

SEQ ID NO: 1258 - DNA, 175 bp, Homo sapiens
ctcagaacagcaactgctaaggctgccttgggaagaggatgatcctaaacaaagctctgatgctggggacccttgccctgaccaccgtgatgagcccctgtggaggtgaagacattgtggctgaccacgtcgcctcttatggtgtaaacttgtaccagtcttacggtccctctgg

SEQ ID NO: 1259 - DNA, 285 bp, Homo sapiens
aaaaaatatgtatctaagaatgttctagggcactctgggaacctataaaggcaggtatttcgggccctcctcttcaggaatcttcctgaagacatggcccagtcgaaggcccaggatggcttttgctgcggccccgtggggtaggagggacagagagacgggagagtcagcctccacattcagaggcatcacaagtaatggcacaattcttcggatgactgcagaaaatagtgttttgtagttcaacaactcaagacgaagcttatttctgaggataagctcttt

SEQ ID NO: 1260 - DNA, 406 bp, Homo sapiens
aaattttatttcaaaagcttggatagcttcaatatccaggttgtggcaaaatcaggacacgtgtaaaataccttacaatacattagattcccaaaaggtaccaaaaagtacagtaaaattaacacttccgttacaggaaatgtatgacgcaaataatataaaattaaaaggtgaaaaaaaggtgacactggtttcctaagatacaatttactctttacaaccagggtccacaggtccaggctgcagagcggcagcaggaagcagagcctcccacctgcttctgggggacctggtaataaaaatcagcccatgatggcgctatggcctctcagacaccacacgctgcctaaacacctagagctctggaaatagtcaacaggagagtgatttccatgggggaaatttt

SEQ ID NO: 1261 - DNA, 409 bp, Homo sapiens
aaaatccctcaaaaactgtttattatacaagtgagttttgagtcacgatgggcttatcggtaggatttctggtagcgagcgcgggcaccagggcctccaaactttttggactcgcagcgacgagggtcagctaccagcagggtccggtcatactggatgaggatgtctttgatctccttcttggaagcctcatccacatatttctggtaataggccaccagggctttggagatggactgacggatagcataaatctgggccacgtgaccaccaccctttacacggacacggatgtctacaccagcaaatcgctccttgccgagaagcagaactggctccagcagcttgtactgtagcgtgcgcggctcaatcatctccaggggccgcccgttcaccttgatgagaccat

SEQ ID NO: 1262 - DNA, 459 bp, Homo sapiens
aaataatgtcaaatggaagtatgtagcaccccccccaccttcttttcccctttctttcctctttgagtctgctgtcattccctttttcatgagttttctctgctccccaaataggctaaacaataaccgtaaagtgagattagagaaaataagaatggagtagatgatggaattcaaaatagctgtctacattcttcactgagaaagatagctttgagttaaaggtgagaggagcaaatctggggaaaaacgggtgaaacggcatgatttaagtagcataccagatgcgtttctgcatggcatggctcttgcttgatgaataatgttctgtatagtagaagaggaaaatacagtgagtgaaggagctggcagaaggtgggctgggggagttggggaagagtgaaatgagtatggagaggtgagagagctgactgcaaaggcatgtggggtgtggatttt

SEQ ID NO: 1263 - DNA, 603 bp, Homo sapiens
  misc_feature 572: n = A,T,C or G
cagattttagcgctggaaaatgagttcaaaaatttcagtgtaatgtcataaggatgttgggatacagagattttttttttccttggaaacaaatggactgggaagaaacacagcatggctttgctctgagtttcaatctgatgattatgaccatggaagatagtcttatgtaaaggttaaatggtgtttacaagtggatagataaggcggagatggtgagaagccgggttttctctatgctaaatgtgtctactaagagcagcacttcctactagctaagcacaatcatagccccaccgtgatgagctgctagtctgaataacattccctgacttagggaaaggcacacaaaaacatataaagaatatgtctattttcatatgtgtgatactgacagagccatggtattcctaaaatataggtttctcttttttcttgtattcttagcaaattgcatttattcactacattacaaaccatcactgatgtatccaaaatagcacacatagttcagtatgaaaataagagaataaaatctgttataagcaagtgatttaggtattttcttttgngtttatgcattatctgactatattaaaacct

SEQ ID NO: 1264 - DNA, 80 bp, Homo sapiens
aaaataaagtttacattgtagttattttcaaatctttgcttgataagtattaagaaatattggacttgctgccgtaattt

SEQ ID NO: 1265 - DNA, 551 bp, Homo sapiens
  misc_feature 399, 407, 414, 422, 521: n = A,T,C or G
gtcgatttgggaggaaaggtgtggctataaactttgttactgaagaagacaagaggattcttcgtgacattgagactttctacaatactacagtggaggagatgcccatgaatgtggctgaccttatttaattcctgggatgagagttttggatgcagtgctcgctgttgctgaataggcgatcacaacgtgcattgtgcttctttctttgggaatatttgaatcttgtctcaatgctcataacggatcagaaatacagattttgatagcaaagcgacgttagtcgtgagctcttgtgaggaaagtcattggctttatcctctttagagttagactgttggggtgggtataaaagatggggtctgtaaaatctttctttcttagaaatttatttcctanttctgtanaaatggntgtattanatgttctctatcatttaataatatacttgtggactaaaagatataagtgctgtataaaatcagccaattatgttaaactagcatatctgcctttattgngtttgtcattagcctgagtagaaaggacct

SEQ ID NO: 1266 - DNA, 462 bp, Homo sapiens
  misc_feature 33, 140, 187, 246, 267, 283, 307, 330, 335, 351, 353, 377,393: n = A,T,C or G
gctttttttttttttttttttttttttttttanattcatacttttattattagggggtaggtaggggtcattttgttgtttatgtacacttcatattttttcaacgaaagacaaaataagattaataaaatagaaatatntgctcagtgttataaaattaaaaagtagttgttctaacacttaaggntattgcagttgctgtatttaaggaataaatttgaccttgagtttcctgacagcgaaggnaaaaatggaacatgatgttgnggttaatacagttatntaacgaatcacccccaaaacttanagtaagctgaaaacaaccacttnttacnctcatgagcatagcananataacttaatccctcggggatggngaatccccggtacttnttacacaccacctgtactatgtgtaactttggcaacaggttgcagtcagccagggtgagctcgttgcca

SEQ ID NO: 1267 - DNA, 307 bp, Homo sapiens
  misc_feature 9, 21, 26, 192, 223: n = A,T,C or G
gcaaagctntattttcatctntcatnttttgtcctccttagcacaatgtaaaaaagaatagtaatatcagaacaggaaggaggaatggcttgctggggagcccatccaggacactgggagcacatagagattcacccatgtttgttgaacttagagtcattctcatgcttttctttataattcacacatatntgcagagaagatatgttcttgttaacattgnatacaacatagccccaaatatagtaagatctatactagataatcctagatgaaatgttaaagatgctatatgatacaactgtgg

SEQ ID NO: 1268 - DNA, 423 bp, Homo sapiens
acttcctttacaaatataaagatagctgtttaggatattttgttacatttttgtaaatttttgaaatgctagtaatgtgttttcaccagcaagtatttgttgcaaacttaatgtcattttccttaagatggttacagctatgtaacctgtattattctggacggacttattaaaatacaaacagacaaaaaataaaacaaaacttgagttctatttaccttgcacattttttgttgttacagtgaaaaaaatggtccaagaaaatgtttgccatttttgcattgtttcgtttttaactggaacatttagaaagaaggaaatgaatgtgcattttattaattccttaggggcacaaggaggacaataatagctgatcttttgaaatttgaaaaacgtctttagatgaccaagcaaaaagacttt

SEQ ID NO: 1269 - DNA, 110 bp, Homo sapiens
accaaacaaaaacacctcagtcagagatgcctcagccttcattgagggctgaccatgcactaatcaggttggagcctcaaaaaacccacgatgtgtttttacctcggccg

SEQ ID NO: 1270 - DNA, 191 bp, Homo sapiens
ccttgtgcttgcgctacaagaatgaaaaggagctccaggaagtgatacagcagcagaatgagaagatcctagaacagatagacaagagtggcgagctcataagccttagagaggaggtggcccaccttacccgctcacttcgacgtgcggagacagagaccaaagtgctccaggaggccctggcaggccag

SEQ ID NO: 1271 - DNA, 456 bp, Homo sapiens
aaaattcatgtttccaatctctctctccctgatcggtgacagtcactagcttatcttgaacagatatttaattttgctaacactcagctctgccctccccgatcccctggctccccagcacacattcctttgaaataaggtttcaatatacatctacatactatatatatatttggcaacttgtatttgtgtgtatatatatatatatgtttatgtatatatgtgattctgataaaatagacattgctattctgttttttatatgtaaaaacaaaacaagaaaaaatagagaattctacatactaaatctctctccttttttaattttaatatttgttatcatttatttattggtgctactgtttatccgtaataattgtggggaaaagatattaacatcacgtctttgtctctagtgcagtttttcgagatattccgtagtacatatttattttt

SEQ ID NO: 1272 - DNA, 380 bp, Homo sapiens
ccaatattttcagttatgtgggtagtacaacttgagtaaccttttttacatgacaaaaagtgagttatataaattgtcctcaactttcacataggaaaaaaatggtttaatagcttcaaaaggaattttctttcatgtatactcttcagtatccaatattgaagctttgttctttgaaaaattttaatttccaatctaggatgcaagcaagaatatatgtttatttgaatagagtaagctatggcaaagaatgaccaaattagctagaaatagaaatcagccagaattaactaatttcttgctaatctagaaatacaatcatcttttttttttttttcaaattttatactgatagggctttactgtttgtggctcatttt

SEQ ID NO: 1273 - DNA, 577 bp, Homo sapiens
ctgcagaggggatcgtggtgaatttcaatgaaaatccatttgaatcttgaggttcagatcttaaaaaagcaaaggacatgagagaagtaatattgttgcttgaaatttcattgcttatatctaaaagaaactcctatttttaagagaaatgttgaatctttgcaacgtggtagacgctcccacaaaactttctcctgaaataggagataaatgttggaaagaggcaatgtattgagtatgctgatagaggtggagttcagagacaggcaagcatacataagagtcaggatgtttttcagtattatctttacaaatgagtttcttacagtggtcaatgacaaaccaatttcattcaaagcttgcttcaataggcaatggtttgatgccaatatgttagctatttactttgaccaccgtatgcattaaaaagaagaaaaattaagaatactcaagcagaacctccaacttagatagcactttccacaaaaagtaatggagggatagactgaagttaaatgggatcaggcacgtgatgagatctcagaagtgtttgcacaataatgcagatactcatttt

SEQ ID NO: 1274 - DNA, 127 bp, Homo sapiens
aaatacactctattttattttgtcttaaaatagtttaacctttatgctacagacttatttcaaaaaacagaaaatcttatcttgcaccaaaaaatatatatataacactctgttttattattttttc

SEQ ID NO: 1275 - DNA, 311 bp, Homo sapiens
ctgggggcctcggaggcacaggagagcaggagcctcggtgtgaaaggaggggagaagagggagatgatcagaagtctgtggaggaaggggcttctgagggagaccagctcttcccttggggtgccagccagcctgggagctgccctctgcctgtgccctccagccctgaccccgtgctcagcactgtccactgggtgtgagtcacaggtcgaggcccacctttcttggcttcaggatgctgggtgccaccttgaaatcaaggttcggtgggagggaaatgaagaccttagccgtgggtagagtcctcaagg

SEQ ID NO: 1276 - DNA, 161 bp, Homo sapiens
gacccatctcccgtgggactccttccatttgaggctgtccatcctccaatggcagatgcagaattctcaggcccaggatacccttatggagggccggggggcggcccctcaaaaccaccaagctgaggccactgtgagcagtcccctttgtagcaggaaga

SEQ ID NO: 1277 - DNA, 433 bp, Homo sapiens
aaaaacaaaaagaaaaagcaaaaatctacaatccttcatcaagatttgatgctttatcacagttcataaatacttcattttatataaataagtcttttctctagttactaggaatttaaaattagacttacatggattctttaatcatgtagaattttcttactccatgatgaggaaggttgagcatgtcattatttttaaaatacatatatttgatttaaacacaatcccccctaaaatcccactgtaaacaaacatttcgaatgtgataaagtttcataataaagaacgtccttaaatcttagcaattagggaagaggaaaaaaaatctgagtaaaaattttgcaatttaaataaaaattgaaaaaaaggctgcatgcatccactagaaggagaggagaggaagggagcactgagtcaagtaacagagaat

SEQ ID NO: 1278 - DNA, 232 bp, Homo sapiens
aaaacatatataaaaagtggttagggactaacatttgtatcaacagttgataaatgtctaagattgtttattatacagcagggtacaatggtagtgctaatgccaacagggcaccatggaagttagtctaaaaattatcgctaggctttatacaagcaacaacatatgctgctgctcttagaattttgggaaatgatctgcttctaatactaagcagttctttaacattttt

SEQ ID NO: 1279 - DNA, 412 bp, Homo sapiens
aaacaaacttccagagaaaactggtctctatatatttaagtaacaaatttgacaaaatacatatttatacatatatagatctctaatataaatattaaatttgaaaaaatcaaatgtgaagcagaaactgctatacaagtatattgtataatatttattttatacattaaagtatttggttgaatatacttcaattaggtttctaaaaaacaccattatctgcttcttagtaattgcgacattcttgaaaagcatgtgaaacgggtataaacttcaactctgtgcttaattcagaattcctgtttgttctcctcaaacttttatcttcctaaagcatcttgccagagactacaaaggaaaggaacatttacagagcactataaacatgtctttggacagtaaaacagtattt

SEQ ID NO: 1280 - DNA, 303 bp, Homo sapiens
  misc_feature 66, 106, 122, 123: n = A,T,C or G
agctttattttcatctctcatcttttgtcctccttagcacaatgtaaaaaagaatagtaatatcanaacaggaaggaggaatggcttgctggggagcccatccagnacactgggagcacatnnagattcacccatgtttgttgaacttagagtcattctcatgcttttctttataattcacacatatatgcagagaagatatgttcttgttaacattgtatacaacatagccccaaatatagtaagatctatactagataatcctagatgaaatgttagagatgctatatgatacaactgtgg

SEQ ID NO: 1281 - DNA, 226 bp, Homo sapiens
ccaaatgcgtagcgggcccagagcttgggctgcacatcggagcattcgcggattaggatgggtaggtcgggattcgccttcttcagctccacgtagcgtttctcaatgaagtccctgacgccctggctgccgggcgagcgctgacataagtggatgcgaatctcacgcaggcccagctttgccccgactcctcgacttgctgcggccgccgccatccttgttaata

SEQ ID NO: 1282 - DNA, 601 bp, Homo sapiens
ctgccgtgtgaaccatgtgactttgtcacagcccaagatagttaagtgggatcgagacatgtaagcagcatcatggaggtttgaagatgccgcatttggattggatgaattccaaattctgcttgcttgctttttaatattgatatgcttatacacttacactttatgcacaaaatgtagggttataataatgttaacatggacatgatcttctttataattctactttgagtgctgtctccatgtttgatgtatctgagcaggttgctccacaggtagctctaggagggctggcaacttagaggtggggagcagagaattctcttatccaacatcaacatcttggtcagatttgaactcttcaatctcttgcactcaaagcttgttaagatagttaagcgtgcataagttaacttccaatttacatactctgcttagaatttgggggaaaatttagaaatataattgacaggattattggaaatttgttataatgaatgaaacattttgtcatataagattcatatttacttcttatacatttgataaagtaaggcatggttgtggttaatctggtttatttttgttccacaagttaaat

SEQ ID NO: 1283 - DNA, 340 bp, Homo sapiens
aaagtttatgaattgaagtctatgaaaacaaactacttgatacaaaaacattcagatattagatgtcaaaataaatcagcacatttgaaaatactataaattatatttcaaacaaatatatacacattatgttaaccttcaacaggatccattatcactacttagaacactgatatgtttatctcttaagtatgtaaaaattacatagctgttaactttgtatggcaattcacctataacacatttaagaaagcattacaaaattcattatatgataattctacaaaagttttctcacatttaccaaagcctactaaagtccagagggcacaaatattgg

SEQ ID NO: 1284 - DNA, 508 bp, Homo sapiens
cctgcaggatgagattcagaatatgaaggaggaaatggctcgtcaccttcgtgaataccaagacctgctcaatgttaagatggcccttgacattgagattgtcacctacaggaagctgctggaaggcgaggagagcaggatttctctgcctcttccaaacttttcctccctgaacctgagggaaactaatctggattcactccctctggttgatacccactcaaaaaggacacttctgattaagacggttgaaactagagatggacaggttatcaacgaaacttctcagcatcacgatgaccttgaataaaaattgcacacactcagtgcagcaatatattaccagcaagaataaaaaagaaatccatatcttaaagaaacagctttcaagtgcctttctgcagtttttcaggagcgcaagatagatttggaataggaataagctctagttcttaacaaccgacactcctacaagatttagaaaaaagtttacaacataatctagttt

SEQ ID NO: 1285 - DNA, 529 bp, Homo sapiens
ctgaaacagttgacagtgtgattatgggcaatgtcctgcagagttcttcagatgctatatatttggcaaggcatgttggtttgcgtgtgggaatcccaaaggagaccccagctctcacgattaataggctctgtggttctggttttcagtccattgtgaatggatgtcaggaaatttgtgttaaagaagctgaagttgttttatgtggaggaaccgaaagcatgagccaagctccctactgtgtcagaaatgtgcgttttggaaccaagcttggatcagatatcaagctggaagattctttatgggtatcattaacagatcagtatgtccagctccccatggcaatgactgcagagaatcttgctgtaaaacacaaaataagcagagaagaatgtgacaaatatgccctgcagtcacagcagagatggaaagctgctaatgatgctggctactttaatgatgaaatggcaccaattgaagtgaagacaaagaaaggaaaacagacaatgtaggtagacgagcatgctcg

SEQ ID NO: 1286 - DNA, 136 bp, Homo sapiens
aaaaacatgctaaaaacatggtgttccataaagccaggaccaggatgaaggaacgcacagatacggcaatgcaagcagaaagtgcatctgaaaccaacaagcgtgctcaccctgctctccctcccgtgctgcccgg

SEQ ID NO: 1287 - DNA, 471 bp, Homo sapiens
aaaaataaatatggtactacggaatatctcgaaaaactgcactagagacaaagacgtgatgttaatatcttttccccacaattattacggataaacagtagcaccaataaataaatgataacaaatattaaaattaaaaaaggagagagatttagtatgtagaattctctattttttcttgttttgtttttacatataaaaaacagaatagcaatgtctattttatcagaatcacatatatacataaacatatatatatatatacacacaaatacaagttgccaaatatatatatagtatgtagatgtatattgaaaccttatttcaaaggaatgtgtgctggggagccaggggatcggggagggcagagctgagtgttagcaaaattaaatatctgttcaagataagctagtgactgtcaccgatcagggagagagagattggaaacatgaattttatatacaaaaaccg

SEQ ID NO: 1288 - DNA, 357 bp, Homo sapiens
  misc_feature 14, 45, 71, 77, 222, 237, 241, 247, 248, 252, 258: n = A,T,C or G
tatgttaactgatncaatggaatatgatttgagaaaatgactcancaaatgattccaaaaaacacccctgngagctntcacaatctgaaacggcaaaatgaggtaaccaaatgtaccaacagggggacaaacaaacagctttctaatgaaaaggcccaaagataatctgtgaaaaatattctcacaagtgagtcggtagatctcattcaaaattattctaanaggcccaaatttaanaatnttaacnnatcncatttnagatagtatataaaatctaaatatgctttcacattttccagattttgctcaaaaaattaaggacagaaaatcctaatatgagatcttgatacctggagg

SEQ ID NO: 1289 - DNA, 522 bp, Homo sapiens
  misc_feature 143: n = A,T,C or G
tctgaggccgaagcccgggctgaagcaagaacccgcatgggaattggagatgaggctgtgtctgggccctggagctgggatgacattgagtttgagctgctgacctgggatgaggaaggagattttggagatccctggtccanaattccatttaccttctgggccagataccaccagaatgcccgccccagattccctcagacctttgccggtcccattattggtcctggtggtacagccagtgccaacttcgctgccaactttggtgccattggtttcttctgggttgagtgagatgttggatattgctatcaatcgcagtagtctttcccctgtgtgaggctgaagcctcagattccttctaaacacagctatctagagagccacatccggttgactgaaagtggcatgcaagataaatttatttgctgttccttgtctactgctttttttcccttgtgtgctgtcaagttttggtatcagaaataaacattgaaattgcaaagtgaaccaaaaaaaaaa

SEQ ID NO: 1290 - DNA, 212 bp, Homo sapiens
tcaacatcgagttcacacgctgccacaagaggaccggcttctccaccagccccgagtccccgtacacgcactggaagcagacggtgttctacatggaggactacctgaccgtgaagacgggcgaggagatcttcggcaccatcggcatgcggcccaacgccaagaacaaccgggacctggacttcaccatcgacctggacttcaagggccag

SEQ ID NO: 1291 - DNA, 506 bp, Homo sapiens
  misc_feature 112, 119: n = A,T,C or G
aaaaaacaaaaaccacaaaaattcccaaaccatacttgctaaaaattctggtaagtatgtgcttttctgtgggggtgggatttggaaggggggttgggttgggctggatatntttgtanatgtggaccaccaaggggttgttgaaaactaattgtattaaatgtcttttgataagccttctgctcacatttttgtgaatgtctgaagtatatagtttgtgtatattgacagagctcttttataactaaagcaaatttaatttttttgtactagaaaaaaatttgaacattttagttcttggttataaaaatgttaattcagaattagtttaatgccttaattaaactaattaatagctttggacacttaaaagagctctaaatttgcttgtacataaaggcttaatttgttttccttgttagggtcaagggtgtcctccactctttaacagacctgcccgggcggccgaaaggccgcgttgctggcgtttttccataggctccgcc

SEQ ID NO: 1292 - DNA, 268 bp, Homo sapiens
ctaatatttgcgtagatgctactcattcactatttgctgaattttagaaggaaaaattgacctgtaaccaaaaatcaagtaaaataatctgcattgacactagaagaaaataatcgcttttcttaaaatataaagaattattatcgtgaggctttgtttactttgttaaaatttatttaacatatttcttatgcatgttaatattttgaaagatgtcaattaatttttacatgtttcacaacattactgttaaactttcagctcattt

SEQ ID NO: 1293 - DNA, 440 bp, Homo sapiens
  misc_feature 12, 366: n = A,T,C or G
aaaaagacttgngcacttgcccaggctcaaggatattaaaatctagcacataaagcccattactagaggtagaaatacaggcaatatactattacggcaacaaccatcaattacagttaagaatttttctgtaacaaccaaatggataatcaaatattgcaacaactcaagtattactgagcaaagtgcatttctacagtattcagtgttgctattcagttttctaacttaaaacagcctatgataactggcagcaaagaaggtccttgcaatagactgcctctgcttgagaacttatgatgtaattattgcatgctgctaatatactatctaaacattaaagatactcctaaaatatttgatggnagactatgattaagacattacactacaaaaaaaccttatgcagaaggaaatcctaactgacgtgcttctgcttt

SEQ ID NO: 1294 - DNA, 258 bp, Homo sapiens
aaagaatgctctttacttcatggacttccactgccatcctcccaaggggcccaaattctttcagtggctacctacatacaattccaaacacatacaggaaggtagaaatatctgaaaatgtatgtgtaagtattcttatttaatgaaagactgtacaaagtagaagtcttagatgtatatatttcctatattgttttcagtgtacatggaataacatgtaattaagtactatgtatcaatgagtaacaggaaaatttt

SEQ ID NO: 1295 - DNA, 113 bp, Homo sapiens
atttggaataggaataagctctagttcttaacaaccgacactcctacaagatttagaaaaaagtttacaacataatctagtttacagaaaaatcttgtgctagaatacttttt

SEQ ID NO: 1296 - DNA, 571 bp, Homo sapiens
aaacattacccagcatcattgtttataatcagaaactctggtccttctgtctggtggcacttagagtcttttgtgccataatgcagcagtatggagggaggattttatggagaaatggggatagtcttcatgaccacaaataaataaaggaaaactaagctgcattgtgggttttgaaaaggttattatacttcttaacaattctttttttcagggacttttctagctgtatgactgttacttgaccttctttgaaaagcattcccaaaatgctctattttagatagattaacattaaccaacataattttttttagatcgagtcagcataaatttctaagtcagcctctagtcgtggttcatctctttcacctgcattttatttggtgtttgtctgaagaaaggaaagaggaaagcaaatacgaattgtactatttgtaccaaatctttgggattcattggcaaataatttcagtgtggtgtattattaaatagaaaaaaaaaattttgtttcctaggttgaaggtctaattgatacgtttgacttatgatgaccatttatgcactttca

SEQ ID NO: 1297 - DNA, 554 bp, Homo sapiens
caggaacgagatggcggttctctggaggctgagtgccgtttgcggtgccctaggaggccgagctctgttgcttcgaactccagtggtcagacctgctcatatctcagcatttcttcaggaccgacctatcccagaatggtgtggagtgcagcacatacacttgtcaccgagccaccattctggctccaaggctgcatctctccactggactagcgagagggttgtcagtgttttgctcctgggtctgcttccggctgcttatttgaatccttgctctgcgatggactattccctggctgcagccctcactcttcatggtcactggggccctggacaagttgttactgactatgttcatggggatgccttgcagaaagctgccaaggcagggcttttggcactttcagctttaacctttgctgggctttgctatttcaactatcacgatgtgggcatctgcaaagctgttgccatgctgtggaagctctgacctttttgacttcatactttgaagaattgatgtatgcctctttgcctctgctttgtcatgccat

SEQ ID NO: 1298 - DNA, 212 bp, Homo sapiens
gtgcagcaatatattaccagcaagaataaaaaagaaatccatatcttaaagaaacagctttcaagtgcctttctgcagtttttcaggagcgcaagatagatttggaataggaataagctctagttcttaacgaccgacactcctacaagatttagaaaaaagtttacaacataatctagtttacagaaaaatcttgtgctagaatacttttt

SEQ ID NO: 1299 - DNA, 311 bp, Homo sapiens
cctcatcagtgtgcatagtggcagaaattataaagaaggttgaaaggagcagggaaaagatccagaagcatgttagttcgacatcatcatcttttcttgaagtatgatgcatattgcattattttatttgcaaactaggaattgcagtctgaggatcatttagaagggcaagttcaagaggatatgaagatttgagaactttttaactattcattgactaaaaatgaacattaatgttaaagacttaagactttaacctgctggcagtcccaaatgaaattatgcaactttgatatcatattccttgattt

SEQ ID NO: 1300 - DNA, 216 bp, Homo sapiens
gctggggagcccatccaggacactgggagcacatagagattcacccatgtttgttgaacttagagtcattctcatgcttttctttataattcacacatatatgcagagaagatatgttcttgttaacattgtatacaacatagccccaaatatagtaagatctatactagataatcctagatgaaatgttagagatgctatatgatacaactgtgg

SEQ ID NO: 1301 - DNA, 579 bp, Homo sapiens
  misc_feature 449, 454, 543, 554: n = A,T,C or G
gacgcttgcatcttaagtactaaggaattactagtgattgttttattttatccatgtactcttttagtatttaataattaaatacctattcttagtgtttgacactccatatttcttttttttggaaatgaaacaaatatgcagtccaaaattcaggaactactagagtgaaatgatattaagtggaaaccagagataaatgctgttaatttaacaagtagattcttctccaaagaatgatgagtgattcttgggaagataaatgttaatgttcccaatagtcaagcttgttttgcagtagtgaaaagcttagatgagtacggatacctcatttgaaactcagcctagtaaggaagtgaaaacttagcagtcagtgacatggggaaatagttatagaaaatgtcactgaattttttcatatttataattagtcatttacatatttttgncttgntgatcattacctgtaaatgaaagaccttaataggaaaaaaagagtaaagctcagtgtgaatgcaaacatccacaaaatatgatcttcgnttatattctgngatggtggttataaatgaatgcctc

SEQ ID NO: 1302 - DNA, 302 bp, Homo sapiens
aaattttatcttactgtttttataatttctattgggaagaggcttgtgaccagtaccaatcttgagtttctttttctgtccacaagtaaattaatatctgctctgaaatgtcatttatctactcacacattcttggggaaaaaaatcaaatgtcagtcctagcagatgttgcatgtaaattggtagcaagtaatgattacaacccagaggattaagaattttgtaacagaaagctctatgttttaattttttatatacaattaggataattagcattgtcagactataaacctttgcttttt

SEQ ID NO: 1303 - DNA, 370 bp, Homo sapiens
aaacctcttggcattttgttttttttggattccccaagcattattcaaaaactggacagcagctcttttcactggtaacctcttgttggcaagagacaggaacttatttacagtagtcctgttggttcctggcccatataatgaattatgtatgaaggcttgtgctgcttgttgccttgaatctctcagatcttggtcttttagccttacggccaagtagcttttattctggctgttgatcaatataaaaggttaaataagaattacacatgcttactttcttttttttttcttcctgagacagagtctcgctctgtcacccaggctgcgcgatctcagctcactgcaacttctgcctcccaggttcaag

SEQ ID NO: 1304 - DNA, 307 bp, Homo sapiens
ctggaaagcctcaaatctaagagggcttcccatcctagatataaaataggtgttgcctattgctgtgcttataaaatgaaaaaggaaattgaggacacttttgcaaatgccagaatgtaagattcattcagtgtgctccctgggcctttatggcatgggttgacaggatttgtttattttctaaaattagcttcattcaatatttatcatcctcctttccctctctgagaatgaactatgtataaaataagcttctgcctatttgcatttatcttccaaacccaatctagtaggatgttctcatttt

SEQ ID NO: 1305 - DNA, 470 bp, Homo sapiens
aaatcatttatctggatttttatgttttattagcattttcaagaagacggattatctagagaataatcatatatatgcatacgtaaaagtggaccacagtgacttatttgtatttgttagttgccctgctacctagtttgttagtgcatttgagcacacattttaattttcctctaattaaaatgtgcagtattttcagtgtcaaatatatttaactatttagagaatgatttccacctttatgttttaatatcctaggcatctgctgtaataatattttagaaaatgtttggaatttaagaaataacttgtgttactaatttgtataacccatatctgtgcaatggaatataaatatcacaaagttgtttaactagactgcgtgttgtttttcccgtataataaaaccaaagaatagtttggttcttcaaatcttaagagaatccacataaaagaagaaactatttttt

SEQ ID NO: 1306 - DNA, 436 bp, Homo sapiens
  misc_feature 158, 230, 259, 272, 317, 357, 367, 377: n = A,T,C or G
tttttttttttttttttttttttttaccaaaaccaaaaaagccattttattgaaaattaaattcaaacttcaaattaatattacaatcatgagaaaaatgccaaataattcaatttacagttgcaacatacaatacaaatagtccctttgaagttaanagtaaactcatccacaatcatgacctgtggcacaaagcggaatttttacaatatgtgcatggaaagcaattnttgggcaatagcaattggaaaaaataaanatgaaagcttgtntttacacaaaatgctacaaatatttttgttccacaaaaacctaanaatggtaaagcatatccaaaagaaatggaattttattcanaatacctaanaaattattgnaagttatggttttggctgatatatttcaaagtactgcattaaaaagcaaacagttattt

SEQ ID NO: 1307 - DNA, 414 bp, Homo sapiens
  misc_feature 125: n = A,T,C or G
ggcgaggagagcaggatttctctgcctcttccaaacttttcctccctgaacctgagggaaactaatctggattcactccctctggttgatacccactcaaaaaggacacttctgattaagacggntgaaactagagatggacaggttatcaacgaaacttctcagcatcacgatgaccttgaataaaaattgcacacactcagtgcagcaatatattaccagcaagaataaaaaagaaatccatatcttaaagaaacagctttcaagtgcctttctgcagtttttcaggagcgcaagatagatttggaataggaataagctctagttcttaacaaccgacactcctacaagatttagaaaaaagtttacaacataatctagtttacagaaaaatcttgtgctagaatacttttt

SEQ ID NO: 1308 - DNA, 433 bp, Homo sapiens
ggcgaggagagcaggatttctctgcctcttccaaacttttcctccctgaacctgagggaaactaatctggattcactccctctggttgatacccactcaaaaaggacacttctgattaagacggttgaaactagagatggacaggttatcaacgaaacttctcagcatcacgatgaccttgaataaaaattgcacacactcagtgcagcaatatattaccagcaagaataaaaaagaaatccatatcttaaagaaacagctttcaagtgcctttctgcagtttttcaggagcgcaagatagatttggaataggaataagctctagttcttaacaaccgacactcctacaagatttagaaaaaagtttacaacataatctagtttacagaaaaatcttgtgctagaatactttttacctcggcgcgaccacgct

SEQ ID NO: 1309 - DNA, 457 bp, Homo sapiens
cggtcttccccctggcaccctcctccaagagcacccctgggggcacagcggccctgggctgcctggtcaaggactacttccccgaaccggtgacggtgtcgtggaactcaggcgccctgaccagcggcgtgcacaccttcccggctgtcctacagtcctcaggactctactccctcagcagcgtggtgaccgtgccctccagcagcttgggcacccagacctacatctgcaacgtgaatcacaagcccagcaacaccaaggtggacaagaaagttgagcccaaatcttgtgacaaaactcacacatgcccaccgtgcccagcacctgaactcctggggggaccgtcagtcttcctcttccccccaaaacccaaggacaccctcatgatctcccggacccctgaggtcacatgcgtggtggtggacgtgagccacgaagaccctgaggtcaagttcaa

SEQ ID NO: 1310 - DNA, 439 bp, Homo sapiens
aaaattaaattttatctcattcagccattcagccagtttttttttttttacattttattaataccaaagtgaaaaatggcctgtgcttatactacaaggatctcatatgaatgcagtcctgattgttcgacacagcaagaaaattcactttcacagtcaacaagtcatcttactcagtagaacacaaagtaaatggtttataactccaatatttgcaaggaaaatacagtacaaattactaaaaaatactaaaatatagaattgtgttcaggcatctccactacatcaatcgcagcagtaacctgaaatttgaaacttttaataaaaagttcttaaatataaattatatggcaaatgtacagtacattgctttttttcagtctctttttccagtgttttgcagtagaacagggttcctaccatcacctcccttaggttt

SEQ ID NO: 1311 - DNA, 331 bp, Homo sapiens; identical to SEQ ID NO: 1014

SEQ ID NO: 1312 - DNA, 486 bp, Homo sapiens
  misc_feature 9, 130, 278, 381, 443, 483: n = A,T,C or G
aaacatgcnaaataactgacaataatgttgcacttgtttactaaagatataagttgttccatgggtgtacacgtagacagacacacatacacccaaattattgcattaagaatcctggagcagaccatanctgaagctgttattttcagtcaggaagactacctgtcatgaaggtataaaataatttagaagtgaatgtttttctgtaccatctatgtgcaattatactctaaattccactacactacattaaagtaaatggacattccagaatatanatgtgattatagtcttaaactaattattattaaaccaatgattgctgaaaatcagtgatgcatttgttatagagtataactcatcgtttacagtatgttttanttggcagtatcatacctagatggtgaataacatattcccagtaaatttatatagcagtgaanaattacatgccttctggtggacattttataagtgcatttnata

SEQ ID NO: 1313 - DNA, 317 bp, Homo sapiens
caacagactgtaagaatcaaagtcaactgacatctatgctacatattattatatagtttgtactgagctattgaagtcccattaacttaaagtatatgttttcaaattgccattgctactattgcttgtcggtgttattttattttattgtttttgactttggaagagatgaactgtgtatttaacttaagctattgctcttaaaaccagggagtcagaatatatttgtaagttaaatcattggtgctaataataaatgtggattttgtattaaaatatatagaagcaatttctgtttacatgtccttgctactttt

SEQ ID NO: 1314 - DNA, 552 bp, Homo sapiens
aacaagctgaaaaccaaggatgagccccagcgggaaacgctgaaagccatccactatgcgttgaactgctgtggtttggctgggggcgtggaacagtttatctcagacatctgccccaagaaggacgtactcgaaaccttcaccgtgaagtcctgtcctgatgccatcaaagaggtcttcgacaataaattccacatcatcggcgcagtgggcatcggcattgccgtggtcatgatatttggcatgatcttcagtatgatcttgtgctgtgctattcgcaggaaccgcgagatggtctagagtcagcttacatccctgagcaggaaagtttacccatgaagattggtgggattttttgtttgtttgttttgttttgtttgttgtttgttgtttgtttttttgccactaattttagtattcattctgcattgctagataaaagctgaagttactttatgtttgtcttttaatgcttcattcaatattgacatttgtagttgagcggggggtttggtttgctttggtttatattttttcagttggttggttttg

SEQ ID NO: 1315 - DNA, 473 bp, Homo sapiens
ccaagatggcggccaccatgaagaaggcggctgcagaagatgtcaatgttactttcgaagatcaacaaaagataaacaaatttgcacggaatacaagtagaatcacagagctgaaggaagaaatagaagtaaaaaagaaacaactccaaaacctagaagatgcttgtgatgacatcatgcttgcagatgatggttgcttaatgataccttatcaaattggtgatgtcttcattagccattctcaagaagaaacgcaagaaatgttagaagaagcaaagaaaaatttgcaagaagaaattgacgccttagaatccagagtggaatcaattcagcgagtgttagcagatttgaaagttcagttgtatgcaaaattcgggagcaacataaaccttgaagctgatgaaagttaaacattttataatactttttttatttgtttaataaacttgaatattgtccaaaaaaaaaaaaaa

SEQ ID NO: 1316 - DNA, 437 bp, Homo sapiens
  misc_feature 47, 76, 117, 198, 212, 263, 333, 346, 355, 380, 428: n = A,T,C or G
gtcctgcagttgaaataactggaaatgatgaataccagtcctatcanattttattgctccaacttatatggcagantgaatactgcgtgttcagaaaccttgtgatgtcttgactgntgcaccaggctgagaaagcagcaatattgatattataaagataaaaatttatcaacattccttaacaggaaattacatggntgagaggaaatgcntaaaatgaaagatgaaaaatctatagtagcagtttatattttcatgattgntttgcctcatttattaaatatttgagaaatctttggagatacatagttttattgaaagctaaaaataggntctaaagtaatgnaaaaatatnaagcacaaatatacttgaatattgnttaaagaattgtgtgaatagcaacatatattatggatatatactttgngatattttt

SEQ ID NO: 1317 - DNA, 470 bp, Homo sapiens
aaaaatctaagcagtcctttgctcattaaaggataaatcagtagttaacactttttctacaaagaaatggtgtgcctggatggtcgtgtaggtgagttttaccaaggattatggtaacaaatgagtgagacctctatggagaaaatattgaaggacattaaagaagacctcataaatggagagagatatatcattaatggataggaagcctcaatggcataagtatgtcagtttctttcaaaactcacctatggattcaatgtgattccaaaccaaatcccaacaaggtctttcctggaattggaagccagattctgaaatgtatttggaaaagtaaagaggcagggttagctatttcattaacaaagaaggaacatcaggcagggagacttgtgttattattaaggcttattataaattattattgtgatcaagatagtgtatttttggtgtagagatagttaaattgg

SEQ ID NO: 1318 - DNA, 385 bp, Homo sapiens
  misc_feature 335, 341: n = A,T,C or G
aaatacaatcttccaaaaagccagattgaaaaagtggctggttcgctttagaacagacaggcaacactataatatctagaatttggcaaagatctgttatataagatacagaatggtactgattaaatgattgttctttttaagccttttgtaagtctagaataataattttaataaataagcagatcaatttgttatattcatttctgtctctaaggatagcaaacatatttctgatacacattgtgaaaaatgttctgagaacatacctgtgcactttgacaaagactaaaaatttttggttatttggtaaaaagtgatctcctttttacttnaaaggntaacaacagccattgaatgtgttgatatatgtcattagaatttt

SEQ ID NO: 1319 - DNA, 388 bp, Homo sapiens
ccaaaagctatgccagataataattttggtgtttgttttgtcctgagtgggacatctgacatctagtaattgcaggagttaagatcttagaatggtttggcaagagactatagtgctgaagtaaatgctgtgttactttcttctatgttagttttttttccgaaagtattttcttttcacggtgttgatttctttttgcatattttaggctcctaactgggcaactcaagattctggcttctactgaagaaccataaagaaaagatgaaaaaaaaaactatcaaagaaagatgaaataataaaactattatataaagggtgacttacattttggaaacaacatattacgtataaattttgaagaattggaataaaattgattcatttt

SEQ ID NO: 1320 - DNA, 500 bp, Homo sapiens
  misc_feature 475: n = A,T,C or G
aaaaataaatatgtactacggaatatctcgaaaaactgcactagagacaaagacgtgatgttaatatcttttccccacaattattacggataaacagtagcaccaataaataaatgataacaaatattaaaattaaaaaaggagagagatttagtatgtagaattctctattttttcttgttttgtttttacatataaaaaacagaatagcaatgtctattttatcagaatcacatatatacataaacatatatatatatatatacacacaaatacaagttgccaaatatatatatagtatgtagatgtatattgaaaccttatttcaaaggaatgtgtgctggggagccaggggatcggggagggcagagctgagtgttagcaaaattaaatatctgttcaagataagctagtgactgtcaccgatcagggagagagagattggaaacatgaattttatatacaaaaaccggtncaaataagagagcaagagagagcaa

SEQ ID NO: 1321 - DNA, 555 bp, Homo sapiens
aaaaatatatacaactatgatgttcaaatatgtattctgagccattatgttcaaacataaatatctgggaaattcaaactgctgcaacaagttaggaaaggattaaggaaaaatgatgagctacaaattatgtagttggaggaagaaaaaaatgttacttagcatttatgtctggataggtatgtattttctaatttacatacacatatccagttgagtatagacaaccatcaaaatgtaaccagttacacagagactagactaagccaacactattttctataacaggtaacagtagtgatttcaaaaattttaatatctcaatagtttcaccaaaaattatttgtggtaatatgctaatattctgaagttttgagaggcacagattaaatgagtgcactatctatgccaaactcagcaagtctataacttactgtttaattatggtgtaagtatctgaacacaatagcatagagaggcaaccagaaaaggacattttacatatgcccatgctgatcaatcacattaacatcagtgcttacaactttcaaattt

SEQ ID NO: 1322 - DNA, 368 bp, Homo sapiens
aaaattctcacttttcactgtaaatgctgaaaggaaattataaacagaattataactgctaatgctattgacttttcattagaaaccaaactattatagtcatttacctgactctgaagaataaaaatgttgccacttagaaatctgggtaaaataccaagtatctttcactttgctcaccttttaatgaaaaatactctaaaataagcagaattagcataaaacagcatgatagcagaactagtataaaataatcataatgtgatttagacttctactcaagagaggcttgtgttcattacaaataatactttatcaaaatatgtccttagagtctgtacttttggaaaatagtatttataaatttt

SEQ ID NO: 1323 - DNA, 433 bp, Homo sapiens; identical to SEQ ID NO: 1167

SEQ ID NO: 1324 - DNA, 576 bp, Homo sapiens
  misc_feature 471, 519: n = A,T,C or G
ctgaaagccatccactatgcgttgaactgctgtggtttggctgggggcgtggaacagtttatctcagacatctgccccaagaaggacgtactcgaaaccttcaccgtgaagtcctgtcctgatgccatcaaagaggtcttcgacaataaattccacatcatcggcgcagtgggcatcggcattgccgtggtcatgatatttggcatgatcttcagtatgatcttgtgctgtgctatccgcaggaaccgcgagatggtctagagtcagcttacatccctgagcaggaaagtttacccatgaagattggtgggattttttgtttgtttgttttgttttgtttgttgtttgttgtttgtttttttgccactaattttagtattcattctgcattgctagataaaagctgaagttactttatgtttgtcttttaatgcttcattcaatattgacatttgtagttgagcggggggntttggtttgctttggtttatattttttcagttgcttgtttttgcttgntatattaagcagaaatcctgcaatgaaaggtactatatttgctagactctagacaag

SEQ ID NO: 1325 - DNA, 470 bp, Homo sapiens; identical to SEQ ID NO: 1085

SEQ ID NO: 1326 - DNA, 182 bp, Homo sapiens
aaattttatatgggctttgttatcttccactggaaaagtgtaatagcatacatcaatggtgtgttaaagctatttccttgcctttttttattggaatggtaggatatcttggctttgccacacacagttacagagtgaacactctactacatgtgactggcagtattaagtgtgcttatttt

SEQ ID NO: 1327 - DNA, 473 bp, Homo sapiens
ccaagatggcggccaccatgaagaaggcggctgcagaagatgtcaatgttactttcgaagatcaacaaaagataaacaaatttgcacggaatacaagtagaatcacagagctgaaggaagaaatagaagtaaaaaagaaacaactccaaaacctagaagatgcttgtgatgacatcatgcttgcagatgatgattgcttaatgataccttatcaaattggtgatgtcttcattagccattctcaagaagaaacgcaagaaatgttagaagaagcaaagaaaaatttgcaagaagaaattgacgccttagaatccagagtggaatcaattcagcgagtgttagcagatttgaaagttcagttgtatgcaaaattcgggagcaacataaaccttgaagctgatgaaagttaaacattttataatactttttttatttgtttaataaacttgaatattgtccaaaaaaaaaaaaaa

SEQ ID NO: 1328 - DNA, 257 bp, Homo sapiens
  misc_feature 28, 231: n = A,T,C or G
tctggaccacttgtcgccatgatattanctagacataaagccatctcttattggttagaacttttgggaccaaataatagcttagtagcgaaggagacacatccagacagtctgagggcaatttatggcacagatgacctaaggaatgcacttcatgggagtaatgactttgctgctgcggaaagagaaatacgttttatgtttcctgaagtgattgttgagcccattccnattggacaagctgctaaggactattt

SEQ ID NO: 1329 - DNA, 167 bp, Homo sapiens
ctgccatgtggcagcagcaggagctactagaatattctcagcacaggaatgaggcttccttggtttccatgtctgtaagggttactgatcacttaccttcttctctttcagacttgaatctgtagacatttctttattgatatggcaaattgcttgcagatattttt

SEQ ID NO: 1330 - DNA, 249 bp, Homo sapiens
  misc_feature 239, 240, 244: n = A,T,C or G
aaatcatttatctggatttttatgttttattagcattttcaagaagacggattatctagagaataatcatatatatgcatacgtaaaaatggaccacagtgacttatttgtagttgttagttgccctgctacctagtttgttattgcatttgagcacacattttaattttcctctaattaaaatgtgcagtattttcagtgtcaaatatatttaactatttagagaatgaaaatactgnncatnttaat

SEQ ID NO: 1331 - DNA, 597 bp, Homo sapiens
  misc_feature 465, 527, 584: n = A,T,C or G
aaaagttaatagctttctaataatagagattcccatgctgacagcaacatagatataaaacagccaagaaagaattaattaaggtatatataaaacctagacaaaaagaagaaccaagtataatgaaaaaaatcaagaaacatgacaataatggagactaaatccctcgatggaaagaattataatcataaatgtaagccttaaagagttaactttagatgtagacaagtcaaactgaagcactaaaaacatgttgaccttatataacacattccttagggggaaaaaaagattttttaatattggaaaaaatatggttaggcatagtggctcatgcctgtaatcccagcacattcagaggccaaggcgggaggactgcttgagcttaggagttcaagaccagcctgggcaacatagtgagaccttgtctctactaaaaacctaaaaagattagctgagtatggnggcatgcacctatagtcccagctactagggaagctgaggcaagaggatggcttgagcctganaaatcaaggctgcagggagctgtaattgtgccctgcactccagcctgggcaacagantgagaccctgtct

SEQ ID NO: 1332 - DNA, 499 bp, Homo sapiens
aaatggcaacttcattgctgccactgaaccaatcctgaatttgggctcaacaggtgaaaagtaacaatatcaaacgaatactaaacagcataacaaaaagattttcagactcttggtcataaagaccgtaatcgttcacattgaatcaatgactaaacatttttgattacccagctacctccaagcaaactgaaaactgtctagtggatcctgaagtccatagtgcctctagccgggtctttcaagtgttgcaccacagggtgatgattgatggtaaaaacagggatcaacccttgtagatcggtggtaagtatggaaaccctctaagaacagtgcagcgtgtgtggtattcagactggttgcatacagcattcaaaaccagtgctggaatagcttgccccaaagtggtagagttataaaaggatatacattgacgtttcttaaaagcatgtgtaatagcatccaggttctgggaatgagttctgattaaaggtatact

SEQ ID NO: 1333 - DNA, 285 bp, Homo sapiens
ggaaaattatagaaaatggggaaaatgagaagaccgtgagttgatgccagttatcatgctgccactacatcgttatctggaggcaacttctggtggtttttttttctcacgctgatggcttggcagagcaccttcggttaacttgcatctccagattgattactcaagcagacagcacacgaaatactatttttctcctaatatgctgtttccattatgacacagcagctcctttgtaagtaccaggtcatgtccatcccttggtacatatatgcatttgctttt

SEQ ID NO: 1334 - DNA, 566 bp, Homo sapiens
cctgaatgtcattcaattagaaactgcagtaggggctgccatcaaaagttttgagaattctctaggtattaatgtgccaaggagccgttttctgcctgtcaaagccacatcagatctcttgctggtgatgtcaaacctctatagtcttaatgcaggatctctgacaatgagtgaaaagcgggaatttcctacagtgcccttggttaaattaggcagttcttttacgaaggttcaagattatctaagaagatttgaaagtataccagatatgcttgaattggatcacctcacagtttcaggagatgtgacatttggaaaaaatgtttcattaaagggaacggttatcatcattgcaaatcatggtgacagaattgatatcccacctggagcagtattagagaacaagattgtgtctggaagccttcgcatcttggaccactgaaatgaaaaatactgtggacacttaaataatgggctagtttcttacaatgaaatgttctctaggattctaaaataggcaggtactttactatgttactgtaccctgcagtgttgatttttacctg

SEQ ID NO: 1335 - DNA, 311 bp, Homo sapiens
  misc_feature 8, 9, 265: n = A,T,C or G
aaaggcanngctttattttcatctctcatcttttgtcctccttagcacaatgtaaaaaagaatagtaatatcagaacaggaaggaggaatggcttgctggggagcccatccaggacactgggagcacatagagattcacccatgtttgttgaacttagagtcattctcatgcttttctttataattcacacatatatgcagagaagatatgttcttgttaacattgtatacaacatagccccaaatatagtaagatctatactanataatcctagatgaaatgttagagatgctatatgatacaactgtgg

SEQ ID NO: 1336 - DNA, 600 bp, Homo sapiens
aaaaatataaagatgcagtatcatttctgatataaagttacttaaaaaaatccaaggtcttagggaattcacaaatcataactagaagtaacttttattaatttaatgtacacataattaccaaattttaatacattaaaaatgtgtaaatgcccacagactgtacaaaaattaacaccccattttgttaaaagttcccaaccacctcccaccataaatatacaaaaacctatttttagatatgtcaaaattgcatgcatgaatattttctaaagcttgaattttgctcttcactggataatgttatctatagctgtttctgtaacagactacataaacattgatatattatttaccatgcctttgaaactgtgcaggactttcataaacatggggaacaaaataaatagagtaaaaactgcaacagttttgtttagatgcaagtgcaattgggaaagctttcgaatttcaggattataaaactactataaaagtatttattctgttgttggcttagccacttgtattcaagcattatttgcagcattgctttacagcagttggtgctagaagatacaaaacatatagttaccactattt

SEQ ID NO: 1337 - DNA, 435 bp, Homo sapiens; identical to SEQ ID NO: 510

SEQ ID NO: 1338 - DNA, 475 bp, Homo sapiens
aaaagtaccccccaacacacacaaattgggaatgaaatatgtaattatagccatctttatatgaaatatccaaacaacaaatatatttaataatataaagatagtgccaaaatcaacaaaagctaagaatactgaggcttaactgaccccgattcgtatgattttgaaataaaatgttcagactttctagctttatcttaatttgcctttgcttcactgctttatgtagttataatgtaaatctaagagatgcttaaaacagattaaaataatattgttaaaaaacatttttcttatctgagaaaatacaatataatcatatctccctcaaaatactcctgataacattagaaagttctgaagtgtttaatcatatataatgccaccattatcacatgaattcagaactgttacctgaatatttaataaaaaattaagttccatgaggatcataggtctctaaaagctacaattt

SEQ ID NO: 1339 - DNA, 573 bp, Homo sapiens
gaactttgccgttgaagctgctaactaccaagacactattggccgcctgcaggatgagattcagaatatgaaggaggaaatggctcgtcaccttcgtgaataccaagacctgctcaatgttaagatggcccttgacattgagattgccacctacaggaagctgctggaaggcgaggagagcaggatttctctgcctcttccaaacttttcctccctgaacctgagggaaactaatctggattcactccctctggttgatacccactcaaaaaggacacttctgattaagacggttgaaactagagatggacaggttatcaacgaaacttctcagcatcacgatgaccttgaataaaaattgcacacactcagtgcagcaatatattaccagcaagaataaaaaagaaatccatatcttaaagaaacagctttcaagtgcctttctgcagtttttcaggagcgcaagatagatttggaataggaataagctctagttcttaacaaccgacactcctacaagatttagaaaaaagtttacaacataatctagtttacagaaaaatcttgtgctag

SEQ ID NO: 1340 - DNA, 401 bp, Homo sapiens
ctgctcttcatttattttgaaagcaaattcatttgaaagtgcataaatggtcatcataagtcaaacgtatcaattagaccttcaacctaggaaacaaaattttttttttctatttaataatacaccacactgaaattatttgccaatgaatcccaaagatttggtacaaatagtacaattcgtatttgctttcctctttcctttcttcagacaaacaccaaataaaatgcaggtgaaagagatgaaccacgactagaggctgacttagaaatttatgctgactcgatctaaaaaaaattatgttggttaatgttaatctatctaaaatagagcattttgggaatgcttttcaaagaaggtcaagtaacagtcatacagctagaaaagtccctgaaaaaaag

SEQ ID NO: 1341 - DNA, 367 bp, Homo sapiens
aaatgcaaacactaccatgaatttaatgtataaaatgttgtcaaaccaagggaaaaaaccacagttcaccatgtggagtttactttttttatatgaatgtttgttgtactgtgtctaagcataacttccctaatgtcattacttttacataccagatttgactgaccactaatgtagtactggggataacttaatatcctatgttgtgtcaagactctttgaagactttcttgaattgctttcgtaaaggtctgaacactgttaaggagaaagctgagtatcaacttgcctttctgatagaaatgtttcttgtgccagttttattgttgagatatactatttttttccttttttaattcagtttttt

SEQ ID NO: 1342 - DNA, 391 bp, Homo sapiens
aaatttgtcaggcattttattattcagtacataatatgtatagatctgagtgctgttttccttgcattgtctattatttttaccttgtctttcccctaagagaatttgaagaaaatcttcaccaatatttctagtgttgatggtaattaggaaaatagtagttgagagatgtaagaatagattgagaagagtgagtaaaatgggtgaaatgacaagtgggaaccatgtagctgagatgtatttgtttagatgaaaagtctacactggttcttaatgtgaaaatcaaaccatgtatctaccttaagaacaatgttgttgtttttaatttattgtagcgatttagtttttttcacgtaatatttctattttctttgcagattgtttttaattt

SEQ ID NO: 1343 - DNA, 356 bp, Homo sapiens
aaacatttttataaatcttaaaattgatatcatcaaagtgagcccatcttgtgtttataaaatacaagagtccttaacatttataattacatagataaaacactttctataaggaagttggatgctttgattttactgtttatagatgttagattgtacagatttgtctgtatttctcaccatatctaatgatacttttttcattagattggtcttcaagaacagtattagttataattattttggttattcagtatatagttagctcttacagtttagctttattcaccatatttatactgtggattcacagcgagaggtagaggttattccaggagagttgatgaccttcattg

SEQ ID NO: 1344 - DNA, 518 bp, Homo sapiens
gtaaaaagcagcattgccaaataatccctaattttccactaaaaatataatgaaatgatgttaagctttttgaaaagtttaggttaaacctactgttgttagattaatgtatttgttgcttccctttatctggaatgtggcattagcttttttattttaaccctctttaattcttattcaattccatgacttaaggttggagagctaaacactgggatttttggataacagactgacagttttgcataattataatcggcattgtacatagaaaggatatggctaccttttgttaaatctgcactttctaaatatcaaaaaggggaaatgaagtataaatcaatttttgtataatctgtttgaaacatgagttttatttgcttaatattagggctttgccccttttctgtaagtctcttgggatcctgtgtagaagctgttctcattaaacaccaaacagttaagtccattctctggtactagctacaaattcggtttcatattctacttaacaattt

SEQ ID NO: 1345 - DNA, 557 bp, Homo sapiens
aaacattacccagcatcattgtttataatcagaaactctggtccttctgtctggtggcacttagagtcttttgtgccataatgcagcagtatggagggaggattttatggagaaatggggatagtcttcatgaccacaaataaataaaggaaaactaagctgcattgtgggttttgaaaaggttattatacttcttaacaattctttttttcagggacttttctagctgtatgactgttacttgaccttctttgaaaagcattcccaaaatgctctattttagatagattaacattaaccaacataattttttttagatcgagtcagcataaatttctaagtcagcctctagtcgtggttcatctctttcacctgcattttatttggtgtttgtctgaagaaaggaaagaggaaagcaaatacgaattgtactatttgtaccaaatctttgggattcattggcaaataatttcagtgtggtgtattattaaatagaaaaaaaaaattttgtttcctaggttgaaggtctaattgatacgtttgacttatgatgacca

SEQ ID NO: 1346 - DNA, 303 bp, Homo sapiens
aaaaaattttatctgcatatttgcatcaaatatttatgtgtaaaatgtatgttttacctccttaaaatgcctaaaagttagttaatagttactttggtttaacctatacacaatgattaagtgcatttaatattggtaatttaatgaaaaccattccttgcccaatggatgtataaatttttgaaagaataagcagaattatataatatgaaatgctatgtaaagttttctatgtaaaaatattatgtataatactattaaaatatcccatgctttgatcaggtggtacatcaataaaatttt

SEQ ID NO: 1347 - DNA, 479 bp, Homo sapiens; identical to SEQ ID NO: 914

SEQ ID NO: 1348 - DNA, 559 bp, Homo sapiens
ctgcttgtaaccactgtgtttatgtcaaagcattcatttttttaggatatctgaaaaaatgccatataagagaaaactctataaaacatctataattttcgaacccaagtacactcttgcattctatgctttaagttaaatgcaaactcctttttccttcttcctgctgcaagtactatctcatcctgatgctcaagagtgtcagggcctgggtttccaaacagagactaccctaaaattatttggggagtagtactttacacaattgcctctcccccacaaatcataattgtttcagtaaaatggttacttggtttttccaagaaaaaactcgtttttactcatttttggcctgtttgtttatttagaaactaatctggattcactccctctggttgatacccactcaaaaaggacacttctgattaagacggttgaaactagagatggacaggttatcaacgaaacttctcagcatcacgatgaccttgaataaaaattgcacacactcagtgcagcaatatattaccagcaagaataaaaaagaaatccatatctt

SEQ ID NO: 1349 - DNA, 384 bp, Homo sapiens
aaaacattgttttctaaacactaacaaaaaaaattaagggcaaactgaaaatacaaatgagatttacaggcactgtgtgtagaatgtgcaaaaattcacttagcttttcttttgtttttttggtgttgctttaagaaactttatcaaatatatttcttacaaatataaagctttctctcccaattgaaggcaattaaaaaattcaaagtttatcaatactcagtacacaggtgaaccagtcaaattcattttctttctggaaaagaataacaaaccaatatttaggatgttcagagactcagcaaaaaccattctagaaatcacccagaacaattgttttctgttgccaaagccttttgttcttcaaaagtcaccatccaccag

SEQ ID NO: 1350 - DNA, 470 bp, Homo sapiens
aaatcatttatctggatttttatgttttattagcattttcaagaagacggattatctagagaataatcatatatatgcatacgtaaaaatggaccacagtgacttatttgtagttgttagttgccctgctacctagtttgttagtgcatttgagcacacattttaattttcctctaattaaaatgtgcagtattttcagtgtcaaatatatttaactatttagagaatgatttccacctttatgttttaatatcctaggcatctactgtaataatattttagaaaatgtttggaatttaagaaataacttgtgttactaatttgtataacccatatctgtgcaatggaatataaatatcacaaagttgtttaactagactgcgtgttgtttttcccgtataataaaaccaaagaatagtttggttcttcaaatcttaagagaatccacataaaagaagaaactatttttt

SEQ ID NO: 1351 - DNA, 369 bp, Homo sapiens
aaagcacaaatgcccacacaactttgacttacaaggtagttctatatagaataaattaaaatgttagtaaaatctgtattaaaaactatgtacaattaaatgtggtttacagggtacataattatgcttctcacatcaattatagttgaggacaattatagttgaggttatctaaaagaaagtgtaatacggacatgaccattcataagtaaaaggctggaagtctccctggagtttatgcagatgatttttacttgttattgcacagtgtgaattggtaggggaaaaaataatacactaacccttgggtcccatacaggcaaattaagattgcattcttcaggctgtttcaatagcactggatttggc

SEQ ID NO: 1352 - DNA, 325 bp, Homo sapiens
  misc_feature 35, 40, 101, 119, 149, 198, 209, 212, 265: n = A,T,C or G
acaagcttttttttttttttttttttttttttttngattngaaaagtcattttattttttcataataaaaatgcatccatgatctgatgcaattcagcagngataaattgaatgactanaaaaaagcaaaaatgtaataaatactacanattataaatacatgtgtaaaatatggtagggaaaggaacaaatgaatanaataaacatanaanagttatacaaagcagcaatattataatttaagctttacatggacaaatttttntttgaaaaaatgattttttgcattggcccattaataaacatagataaataatgaacatgg

SEQ ID NO: 1353 - DNA, 548 bp, Homo sapiens
tttcagtattcttggttaatatttaatttcaactatttatgagatgtatcttttgctctctcttgctctcttatttgtaccggtttttgtatataaaattcatgtttccaatctctctctccctgatcggtgacagtcactagcttatcttgaacagatatttaattttgctaacactcagctctgccctccccgatcccctggctccccagcacacattcctttggaataaggtttcagtatacatctacatactatatatatttggcaacttgtatttgtgtgtatatatatatatatgtttatgtatatatgtgattctgataaaatagacattgctattctgttttttatatgtaaaaacaaaacaagaaaaaatagagaattctacatactaaatctctctccttttttaattttaatatttgttatcatttatttattggtgctactgtttatccgtaataattgtggggaaaagatattaacatcacgtctttgtctctagtgcagtttttcgagatattccgtagtacatatttattttt

SEQ ID NO: 1354 - DNA, 508 bp, Homo sapiens
aaaaataaatatgtactacggaatatctcgaaaaactgcactagagacaaagacgtgatgttaatatcttttccccacaattattacggataaacaatagcaccaataaataaatgataacaaatattaaaattaaaaaaggagagagatttagtatgtagaattctctattttttcttgttttgtttttacatataaaaaacagaatagcaatgtctattttatcagaatcacatatatacataaacatatatatatatacacacaaatacaagttgccaaatatatatatagtatgtagatgtatattgaaaccttatttcaaaggaatgtgtgctggggagccaggggatcggggagggcagagctgagtgttggcaaaattaaatatctgttcaagataagctagtgactgtcaccgatcagggagagagagattggaaacatgaattttatatacaaaaaccggtacaaataagagagcaagagagagcaaaagatacatctc

SEQ ID NO: 1355 - DNA, 543 bp, Homo sapiens
  misc_feature 507: n = A,T,C or G
ctgtgtagtaaagatgccttctggtgaatttgcacgtatatgccgagatctcagccatattggagatgctgttgtaatttcctgtgcaaaagacggagtgaaattttctgcaagtggagaacttggaaatggaaacattaaattgtcacagacaagtaatgtcgataaagaggaggaagctgttaccatagagatgaatgaaccagttcaactaacttttgcactgaggtacctgaacttctttacaaaagccactccactctcttcaacggtgacactcagtatgtctgcagatgtaccccttgttgtagagtataaaattgcggatatgggacacttaaaatactacttggctcccaagatcgaggatgaagaaggatcttaggcattcttaaaattcaagaaaataaaactaagctctttgagaactgcttctaagatgccagcatatactgaagtcttttctgtcaccaaatttgtacctctaagtacatatgtagatattgntttctgtaaataacctatttttttctctattctctg

SEQ ID NO: 1356 - DNA, 373 bp, Homo sapiens
ctgggggtatggaattggctgaggatcaaacgtatgtaggtgaaaggataccaggatgttgctaaaggtgagggacagtttgggtttgggacttaccggggtgatgttagatctggaacccccaagtgaggctggagggagttaaggtcagtatggaagatagggttgggacagggtgctttggaatgaaagagtgaccttagagggctccttgggcctcaggaatgctcctgctgctgtgaagatgagaaggtgctcttactcagttaatgatgagtgactatatttaccaaagcccctacctgctgctgggtcccttgtagcacaggagactggggctaagggcccctcccagggaagggacaccatcagg

SEQ ID NO: 1357 - DNA, 406 bp, Homo sapiens
ctggaagagttgaataaagagcttactggaatccagcagggttttctgcccaaggatttgcaagctgaagctctctgcaaacttgataggagagtaaaagccacaatagagcagtttatgaagatcttggaggagattgacacactgatcctgccagaaaatttcaaagacagtagattgaaaaggaaaggcttggtaaaaaaggttcaggcattcctagccgagtgtgacacagtggagcagaacatctgccaggagactgagcggctgcagtctacaaactttgccctggccgagtgaggtgtagcagaaaaaggctgtgctgccctgaagaatggcgccaccagctctgccgtctctggagcggaatttacctgatttcttcagggctgctgggggcaactgg

SEQ ID NO: 1358 - DNA, 477 bp, Homo sapiens
aaaagggaactgctgacaaagattcactggtaataatttgaacaagttggaaaatacagtcaacattactgaaacactactaaaataattccaggacagaacaaaacttcttagatgctgtctttgatgtgaaaattgactgcttcttgcttttctaacacacggtggtataattaacaatattcaatcacttctattctttcctgcatatataaaaattaaaataccaattaaaaaactaatatatcttctctttatttcttacagatatgagttcaatgtttcactcaatagtgctgtggtttaagagaattttttcatttacaagttaaacaacaatccgcccaaagggaactgatagtctataggctcatagtgcaaataaacagtttaggaatgcagcaactgacatttctaaagtacaaaacagataaaattcttagaagatacatgcaaaaagctctactaagcagatgg

SEQ ID NO: 1359 - DNA, 601 bp, Homo sapiens
  misc_feature 535, 566: n = A,T,C or G
aaaagatttacaattgagtatggtacccacagagagtgagtaccaagggaaggaagacctaatacaagtgatgttgcctgataaatcacatcttgccaaaaaaatatattttagtaaatacagttctttaggaagaaaaatgttgccctttcacactcacagtgtaaatacattcataatattccttcaatcatctaaattaccgccaggtcatgaaaggacgcgatcaatgatgacctattgcactcacaggtaacattgactcaaattttggcaatattgctatattatctagataattcttgtgatgtttttatgtcactatcaacattaaaaatattttgttaaacaactatgaaactttcaaaagtttgcatataactgtatgggcactctcatttcactgcatacatacaatactttgtatacacatacttctcgtgtggatattttataattttatttaatctaacatttaacttttaggtttttgtggtactcatctgaaaggttggcatttggtttctttttatgntatatatgtattttagatgaatcaataatgngtattcctagaaattttttctaggcataaatagat

SEQ ID NO: 1360 - DNA, 257 bp, Homo sapiens
ctgctgcgacccggaggcatcctcgccgtcctcagagtcctgtggcgcgggaaggtgctgcaacctccgaaaggggacgtggcggccgagtgtgtgcgaaacctaaacgaacgcatccggcgggacgtcagggtctacatcagcctcctgcccctgggcgatggactcaccttggccttcaagatctagggctggcccctagtgagtgggctcgagggagggttgcctgggaaccccaggaattgaccctgagtttt

SEQ ID NO: 1361 - DNA, 126 bp, Homo sapiens
  misc_feature 10, 60: n = A,T,C or G
ttgccagctncagcagccttcttgtccactgctttgatgacacccaccgcaactgtctgnctcatatcacgaacagcaaagcgacccaaaggtggatagtctgagaagctctcaacacacatgggc

SEQ ID NO: 1362 - DNA, 104 bp, Homo sapiens
aaaaaaaaaaaaaaaaaaaaaaaaaaaaaaaaaaaaaaaaaaaaaaaaaaaaaaaaaaaaaaaaaaaaaaaaaaaaaaaaaaaaaaaaaaaaaaaaaaaaaaaa

SEQ ID NO: 1363 - DNA, 163 bp, Homo sapiens
ctgtcttctgttccaggaggaaaaagctttttattaaaaaacagaaacgaaactttagaaaatatgaaaaatcagagggaggacagaggtcatttcataaaatcgttatttgaaaacagtgcagtgtgcaaataacactcagttgggaatcgggagaccgggg

SEQ ID NO: 1364 - DNA, 475 bp, Homo sapiens
aaaagtaccccccaacacacacaaattgggaatgaaatatgtaattatagccatctttatatgaaatatccaaacaacaaatatatttaataatataaagatagtgccaaaatcaacaaaagctaagaatactgaggcttaactgaccccgattcatatgattttgaaataaaatgttcagactttctagctttatcttaatttgcctttgcttcactgctttatgtagttataatgtaaatctaagagatgcttaaaacagattaaaataatattgttaaaaaacatttttcttatctgagaaaatacaatataatcatatctccctcaaaatactcctgataacattagaaagttctgaagtgtttaatcatatataatgccaccattatcacatgaattcagaactgttacctgaatatttaataaaaaattaagttccatgaggatcataggtctctaaaagctacaattc

SEQ ID NO: 1365 - DNA, 387 bp, Homo sapiens
ctcaaaatctagcaaaggaagtagtctgcattggtgtgcattacagtattttgcttaatgaaagcctcagttctgaatgttgatatgagtagttaaaagggagtggggccattttatgtgtttatctgtgtcaagtatttctggtaataagaagcacttaatttacacatattttaatcctgtgaaagattccacatagagaaaagaaagatacctaaccttcaacaaatgttatttttggaaacacaatttttgtcattaaatgttatattatttcacatatataaaacagatgttatgtaagaatgttgtatattttaacataaatcatttagagaaattatctagattcattaattttcatagtgcctttttcacatgagtcag

SEQ ID NO: 1366 - DNA, 598 bp, Homo sapiens
tgacgccctgcgccaggcaaagcaggagtccactgagtaccggagacaggtgcagtccctcacctgtgaagtggatgcccttaaaggaaccaatgagtccctggaacgccagatgcgtgaaatggaagagaactttgccgttgaagctgctaactaccaagacactattggccgcctgcaggatgagattcagaatatgaaggaggaaatggctcgtcaccttcgtgaataccaagacctgctcaatgttaagatggcccttgacattgagattgccacctacaggaagctgctggaaggcgaggagagcaggatttctctgcctcttccaaacttttcctccctgaacctgagggaaactaatctggattcactccctctggttgatacccactcaaaaaggacacttctgattaagacggttgaaactagagatggacaggttatcaacgaaacttctcagcatcacgatgaccttgaataaaaattgcacacactcagtgcagcaatatattaccagcaagaataaaaaagaaatccatatcttaaagaaacagctttcaagtgcctttctgcagtttttcaggagcgcaagata

SEQ ID NO: 1367 - DNA, 420 bp, Homo sapiens
aaaaatgttttaagttttatttttaatcgacaagtcattgtattgcatttgtggaatacagtgtgatgctttgcaggtacataatgtgaaattattagatcaagctaattaacatctttcatttttttcagtggtaatacatttgaaatttgctgtttcaatatatattattgactgtagtcaccctgttgtgcagtagatctcaaaatttattccttgagtttagctgcagccttctacccattctctttcccaccttccccagcaccccaccctcatcctctgataaccatcattctgttctctacttctaggagttcaacttaagattttacctgtaagtgagatcatgtaatgtttgtctttctgtgcctggtttattttatttggcataatgtcctctaagatccatccacattg

SEQ ID NO: 1368 - DNA, 296 bp, Homo sapiens
  misc_feature 221: n = A,T,C or G
aaatgactgtgctgcccctttcacatcaaagaactactgacaacgaaggccgcgcctgcctttcccatctgtctatctatctggctggcagggaaggaaagaacttgcatgttggtgaaggaagaagtggggtggaagaagtggggtgggacgacagtgaaatctagagtaaaaccaagctggcccaaggtgtcctgcaggctgtaatgcagtttaatcanagtgccatttttttttgttcaaatgattttaattattggaatgcacaatttttttaatatgcaaataaaaagttt

SEQ ID NO: 1369 - DNA, 307 bp, Homo sapiens
cctacccattctcctagtttcttgttgtcatcaaccttaattaggttgatttggtgttcagcacaaagggcctccaccaacttgacatacataggctcatcacagttggatgcaagcacacaaagatgggcttggcgcttgtctaaggctttggcagcttcgcgaattccacgtgctaggccatcgtggatgagggcagtcttcagaacctcttgtaaagcagtattaacgtccattacacctccagcagcaatgccttcctcggccatggcggtgggttacgggtgaagctgaatcctgaacgcac

SEQ ID NO: 1370 - DNA, 100 bp, Homo sapiens
cctcatcttacaggtcctaaatcactcatctggcctggataatctcactgccctggcacattcccatttgtgctgtggtgtatcctgtgtttccttgtcc

SEQ ID NO: 1371 - DNA, 457 bp, Homo sapiens
  misc_feature 449: n = A,T,C or G
ggactaggctgacccctgtgtcgttacccccagaaccagcctgtgaggatgcagatgaggatgaggacgactatcacaacccaggctacctggtggtgcttcctgacagcaccccggccactagcactgctgccccatcagctcctgcactcagcacccctggcatccgagacagtgccttctccatggagtccattgatgattacgtgaacgttccggagagcggggagagcgcagaagcgtctctggatggcagccgggagtatgtgaatgtgtcccaggaactgcatcctggagcggctaagactgagcctgccgccctgagttcccaggaggcagaggaagtggaggaagagggggctccagattacgagaatctgcaggagctgaactgagggcctgtggaggccgagtctgtcctggaaccaggcttgcctgggacggctganctgggcag

SEQ ID NO: 1372 - DNA, 293 bp, Homo sapiens
aaaataatttgtaagtctagcaaatataagcttgacgggttcttaactaacatattaagtaattacaaagattcatttttttacaaacttttaagctattttaataaaatggctatagacctcactgtacttctatttatctgtgcattaataaaaacctgttaaaattccttatttagtacttctgaaaaagtctaatcaaataagatcactaaaattaccagaaaagctttgaaatactgattgcagattcatttcaaagtagatttaacccctttcaggatctggtgttt

SEQ ID NO: 1373 - DNA, 507 bp, Homo sapiens
  misc_feature 480: n = A,T,C or G
aaatacaatactgatagttagaagaaaactattgtactcttttgttttagtggagaaataatagatgtctgttcatgtgttaagtgttatagcaaaaaaaatacacatatggttaagttaatgaatagtttttgttttatcagaatggcaacagacagaagtactttgtagagattgacttcctaagctacttaagacaacttgcaccactaagaaaaaaatgtagaaccatttggaaaaatgaaatttagtagttccaagtttcaaagaaatgtcaacattttattccattcaataaagaacaaaaccaatagtgtttttatcactttcatctgaaacattccatgttttaatctgagccttgcagactttcatttggagtttgaacccgttttggttgcatttcatttttggagaacttaattaacgtgagattggcaattgaaatgcaggtgcagttttctgttaatgtcatgctgntgtttaggtaataagaaatattaagta

SEQ ID NO: 1374 - DNA, 486 bp, Homo sapiens
  misc_feature 466: n = A,T,C or G
ccttcctcttttactaatcctactcagcacagatccttcacgggtgtcgggctggtggatggtcaggtctttcccatcccacaaggccatatctcagtggggagaaaccttggatggtacccggctttcctgggcagaggtccctgcggctttccgcagtgcattgtgcccctggtttatcgagaatggagaatggcgataacttttaccaagcgtactgcctgtaagcattttcttaacaaggcacgtcctgcacagccctagatccctgaaaccttgattccatacaacacaggtttctgtgagctcaaggctggggctaaagttacagattaacagcatctcagggcaaaacaatcgctcggggtacagatcaaaatggagtttcttacgtcctccttttctacacagacacagtaccagcctgatctctcttttccccacatctacaaacgccacagtgaanaactttgttgcaaacacatg

SEQ ID NO: 1375 - DNA, 409 bp, Homo sapiens
  misc_feature 79, 205, 356: n = A,T,C or G
ctgttttactgtccaaagacatgtttatagtgctctgtaaatgttcctttcctttgtagtctctggcaagatgctttangaagataaaagtttgaggagaacaaacaggaattctgaattaagcacagagttgaagtttatacccgtttcacatgcttttcaagaatgtcgcaattactaagaagcagataatggtgttttttanaaacctaattgaagtatattcaaccaaatactttaatgtataaaataaatattatacaatatacttgtatagcagtttctgcttcacatttgattttttcaaatttaatatttatattagagatctatatatgtataaatatgtattttgncaaatttgttacttaaatatatagagaccagttttctctgaagttgttacctg

SEQ ID NO: 1376 - DNA, 264 bp, Homo sapiens
cggccgaggtcctgccagatatttgtgagaaatctgccattcgatttcacatggaagatgctaaaggacaaattcaacgagtgcggccacgtgctgtacgccgacatcaagatggagaatgggaagtccaaggggtgtggtgtggttaagttcgagtcgccagaggtggccgagagagcctgccggatgatgaatggcatgaagctgagtggccgagagattgacgttcgaattgatagaaacgcttaagcagttgcctttttt

SEQ ID NO: 1377 - DNA, 416 bp, Homo sapiens
ctggggcttccattcacgactttctggtccctggcaggacagagcgggatgccaccagcttgtccaaagggaagttccaggagctcctggtgggcatcgttgtggagaatgacgctggccgcggcgagatcaacgagttgaagcaggtggaaggggaggcttcgtgcagcagccgcaaaggaaagctgattttcttctatgagtggaacatcaaactgggctggaaaggcatcgttaaagaatctggagtgaagcacaagggattgattgaaatacccaatctttctgaggaaaatgaagtagatgacactgagaatttacaacgggaatgattttaccgacgaaagctatggcaacccaggaattgactgtcaaaagaaaactgagtgggaataccctgcaggttcaggacctcg

SEQ ID NO: 1378 - DNA, 485 bp, Homo sapiens
tgcctgactaacttccatggcatggatcttacccgtgacaaaatgtgttccatggtcaaaaaatggcagacaatgattgaagctcacgttgatgtcaagactaccgatggttacttgcttcgtctgttctgtgttggttttactaaaaaacgcaacaatcagatacggaagacctcttatgctcagcaccgacaggtccgccaaatccggaagaagatgatggaaatcatgacccgagaggtgcagacaaatgacttgaaagaagtggtcaataaattgattccagacagcattggaaaagacatagaaaaggcttgccaatctatttatcctctccatgatgtcttcgttagaaaagtaaaaatgctgaagaagcccaagtttgaattgggaaagctcatggagcttcatggtgaaggcagtagttctggaaaagccactggggacgagacaggtgctaaagttgaacgagctgatggatatga

SEQ ID NO: 1379 - DNA, 391 bp, Homo sapiens
ctgtattggattgccacacggctcacattgcatgcaagtttgctgagctgaaggaaaagattgatcgccgttctggtaaaaagctggaagatggccctaaattcttgaagtctggtgatgctgccattgttgatatggttcctggcaagcccatgtgtgttgagagcttctcagactatccacctttgggtcgctttgctgttcgtgatatgagacagacagttgcggtgggtgtcatcaaagcagtggacaagaaggctgctggagctggcaaggtcaccaagtctgcccagaaagctcagaaggctaaatgaatattatccctaatacctgccaccccactcttaatcagtggtggaagaacggtctcagaactgtttgtttcaattgg

SEQ ID NO: 1380 - DNA, 316 bp, Homo sapiens
aaaatcagttacggcaattcacttaaggagcttgagggccgtgttaaaaggagccaggttttcacaagacctcatccacctctgcacattggctggcactgtcacactgcagcctccgatctgctggagtacagaccacagcaccacgtctgctacggtgagttcattcccagcgagccaagggctcttcccaagagcagagttcatggagcggaaaacagcggctttttctttactgcttccctcttttaactgaaaaatcgcaatatctacccagctatctataagggttgcgttgacagcattatgcttctgg

SEQ ID NO: 1381 - DNA, 488 bp, Homo sapiens
  misc_feature 95, 125, 134, 221, 241, 252: n = A,T,C or G
aaaaaagaaacatttggtaaggggaattgaggacactgatatgggtcttgataaatggcttcctggcaatagtcaaattgtgtgaaaggtacttnaaatccttgaagatttaccacttgtgtttngcaagccanattttcctgaaaacccttgccatgtgctagtaattggaaaggcagctctaaatgtcaatcagcctagttgatcagcttattgtctantgaaactcgttaatttgtantgttggagaanaactgaaatcatacttcttagggttatgattaagtaatgataactggaaacttcagcggtttatataagcttgtattcctttttctctcctctccccatgatgtttagaaacacaactatattgtttgctaagcattccaactatctcatttccaagcaagtattagaataccacaggaaccacaagactgcacatcaaaatatgccccattcaacatctagtgagcagtcaggaa

SEQ ID NO: 1382 - DNA, 234 bp, Homo sapiens
aaagaatagcccattgttcattcttgtgctgtacaatgaccactgttattgttactttgacttttcagagcacacccttcctctggtttttgtatatttattgatggatcaataataatgaggaaagcatgatatgtatattgctgagttgaaagcacttattggaaaatattaaaaggctaacattaaaagactaaaggaaaaaaaaaaaaaaaaaaaaaaaaaggcttgtac

SEQ ID NO: 1383 - DNA, 459 bp, Homo sapiens
ccaagccccccggacactgatttatgatacattgaacagacacccctggacacctgcccaattctcaggctccctccttgggggcaaagctgccctgaccctttcgggtgcgcagcctgaggatgaggctgtttattactgcttgctctcctatggtggttctcggggggtgttcggcggagggacgaaggtgaccgtcctaggtcagcccaaggctgccccctcggtcactctgttcccgccctcctctgaggagcttcaagccaacaaggccacactggtgtgtctcataagtgacttctacccgggagccgtgacagtggcctggaaggcagatagcagccccgtcaaggcgggagtggagaccaccacaccctccaaacaaagcaacaacaagtacgcggccagcagctatctgagcctgacgcctgagcagtggaagtcccacagaagctacag

SEQ ID NO: 1384 - DNA, 231 bp, Homo sapiens
tctcggagcacgcggccatccccctcaaggcgtctgtcctctctcaaatgagctttgccagccagtccatgcctaccatcccagccctggcgctctcagtggcaggcatccctgggttggatgaggccaacacatctccccgcctcagccagaccttcctccaactctcagatggtgacaagaagacactcacacggaagaaggtcaatcagttcttcaagacaatgctgg

SEQ ID NO: 1385 - DNA, 407 bp, Homo sapiens
gatcaagggtgttacactgggcttccgttacaagatgaggtctgtgtatgctcacttccccatcaacgttgttatccaggagaatgggtctcttgttgaaatccgaaatttcttgggtgaaaaatacatccgcagggttcggatgagaccaggtgttgcttgttcagtatctcaagcccagaaagatgaattaatccttgaaggaaatgacattgagcttgtttcaaattcagcggctttgattcagcaagccacaacagttaaaaacaaggatatcaggaaatttttggatggtatctatgtctctgaaaaaggaactgttcagcaggctgatgaataagatctaagagttacctggctacagaaagaagatgccagatgacacttaagacctacttgtgatattt

SEQ ID NO: 1386 - DNA, 570 bp, Homo sapiens
  misc_feature 518: n = A,T,C or G
ccagtactttgcatacatcatgcccaacctttacaacaatcctgttatgtccatttactgacatcacattgctaaatgcagatccctttgattctcaagccatgctctttgttcagccgctgcaagtacaaaccaaattctgttaagaaaactcatcattgaactggtattttatcagcccaatatcatataatataaatagaatcaatcaagcattgctcaaagcaatgagccagtggctaagaattgaaaatcaatggaattgagactttcttctttaagggggaaaaaaaaaatcagaaatgtgtgttcccaaaaaaaattatggatatgtccaaactgtgccataaatgttagattaagttactttcaaatttttttaattctaatagccctttctctatttttttcttctaattaagtatatattttgtaagttttccatctgaaattttattaccagcaatgaagtacaaagcaaaagcagcagaggcatgtcagtccagataaaatattgncacaagccataaaatcattagaaaccaatgatgttgcatgctttcttgatgg

SEQ ID NO: 1387 - DNA, 254 bp, Homo sapiens
ctgccgtgccatatcctgcttggcccgctgcagggcggcttccagctcctcctgcttggcacgagcatccttgagcgccagctccccacgctcctcagcctcggcaatggcggcctccaacttggcacgctggttcttgatgttgtcgatctcagcctgcagcctctggatggcccggttcatctctgaaatctcattccgggtattccggaggtcgtccccatgcttcccagcctgggcctggagggtctcaa

SEQ ID NO: 1388 - DNA, 499 bp, Homo sapiens
aaaacaactacttaacatttactcatagataaaaatatttacaattttacaccttcaggaaggctccaaaatataaacactgtacctctccctagagaaaaaaaaaaattattcttctcttcaaaaacaggaatacattcattttttctcactgtgtgaatcaagtaattatacaaataaacatctgaaacattttcctttttaatatatttatataatatatatttataacagctttacaaataaaggcaacgacttaataccaaaataaaaacaggaaaagaaaaagttaaaacacgatcagcaatcaggcatagtgcattttgaaaagctgctgcggagctggctggacacatcgggaaaacaagtactctggaccaaaaataaaacttctttgaaggagacggaatcctttttagcaataaggacactccatatgccgttgggcaagaggaattagcctacagaaaggatctggcggtgccaaggcttggttagg

SEQ ID NO: 1389 - DNA, 406 bp, Homo sapiens
  misc_feature 355: n = A,T,C or G
ccacctgttgttcatctcccaggtcagccacagcgtatgatgggtcctctctcacaagcatcaaggtatataggcccgcagaatttttaccaggttaaagacgttcggaggccagaaaggcgccatagtgacccttggggtaggcaagaccaacagcaactggataggccatttaataggggtaaaggggaccgccagagattttatagtgattcacaccatttgaaaagagagcgacatgaaaaggaatgggagcaagaatctgaaaggcatagacgcagagacagaagccaagacaaggacagagacagaaaaagcagggaggaagggcacaaagataaagagagggcacggntatcacatggtgatcgaggaacagatggaaaagcaagcagagatagtagga

SEQ ID NO: 1390 - DNA, 444 bp, Homo sapiens
gtgcacagccctggctcccgaggcaggcaggcaaggtgacgggactggaagcccttttcagagccttggaggagctggtccgtccacaagcaatgagtgccactctgcagtttgcaggggatggataaacagggaaacactgtgcattcctcacagccaacagtgtaggtcttggtgaagccccggcgctgagctaagctcaggctgttccagggagccacaaaactgcaggtagtgatgtgcaagagtccatcctgcagttttccagcaatgagaaactcctcgctgcggttgtgggacctgtggaagtatccgcagacactctccatggcgggggtgtagacgaaccggatgtcagcggcatcccctaaggcttggaaccctttatacatcttggtcatcttgatctcataaccgctggtataaggtggtctggttgacttc

SEQ ID NO: 1391 - DNA, 324 bp, Homo sapiens
ctggaaggctggactacttcctcctcccaactgcggggtcccagaaatcctcgggtcccagtggctgacttacaatattcaattcactctgaccaaacttcctatgagaaaatccacggtgagccaaaatgaaaagtacaaggcagtagtacaggaacctggcagccgcgctggccgcccagaaacgtcagtggtgctgccccattcggcgaaaggttagggagcaggaaaagaggaagcaggagagggaaggaaagtcccatggaatatgtattccagaatccttacattttctcagccaccgctccccacgtgagttcccac

SEQ ID NO: 1392 - DNA, 260 bp, Homo sapiens
aaaacacacaaatgtatctgtttctgatgtcatgtttggtcaactgagggcagcaaaggtccataagaagagtgcaaggccattaaaaaaacagtgctctggccgggcgcggtggctcacatctgtaatcccagcactttgggaggccaaggcgggcggatcatctgaggtcagtttgagaccagcctggctaacacggtgaaaccctgtttctattaaaatacaaaaaattagctggtgtggtggcacgtgcctggaat

SEQ ID NO: 1393 - DNA, 307 bp, Homo sapiens
gcgcgcttcgacagcgacgtgggggagttccgggcggtgacggagctggggcggcctgatgaggagtactggaacagccagaaggacatcctggaggaggagcgggcagtgccggacaggatgtgcagacacaactacgagctgggcgggcccatggccctgcagcgccgagtccagcctagggtgaatgtttccccctccaagaaggggcccttgcagcaccacaacctgcttgtctgccacgtgacggatttctacccaggcagcattcaagtccgatggttcctgaatggacaggaggaaacag

SEQ ID NO: 1394 - DNA, 298 bp, Homo sapiens
aaagaacttttatttatcaaatcctttgccatgaatgagagcaccaaataacatatcaatacccaactgcctgattcctttacagcagtaagaaaagtcagtaaaacatttgtacagtccaagtactacaacaccaagatcccctcttcaagtgagagtgagccaaagcttccttagtatcatctcaagtcaatgtcttttcactataccattaagatgaaaataactaagagcactgacacaattttcttgctctttccatctaaaaatgtgggtttcctgtggtgtggctaatttt

SEQ ID NO: 1395 - DNA, 335 bp, Homo sapiens
ctgtgaggctctatgtggagctccaccgtggggaggaactaggtgggggccaggaccctgtgcaattgctcagtggcttccccagacgggccttctcagaagctgacatggagcggcctctgcaggagctgggtatggctgcaagactagaaaccaggactagaaactgggggagtagggaggcatgcctaggaaaaggagggatgcaaagagaaggggctttgtgaacatggtgcaaggccaggaattttgggagcaaaaaccaagtatccttgtggttcaagcctgttttcttccatcttcaggactcgtgccttctgctgttctcattgtgg

SEQ ID NO: 1396 - DNA, 413 bp, Homo sapiens
gctttggatccatttccatcggtccttacagccgctcgtcagactccagcagccaagatggtgaagcagatcgagagcaagactgcttttcaggaagccttggacgctgcaggtgataaacttgtagtagttgacttctcagccacgtggtgtgggccttgcaaaatgatcaagcctttctttcattccctctctgaaaagtattccaacgtgatattccttgaagtagatgtggatgactgtcaggatgttgcttcagagtgtgaagtcaaatgcatgccaacattccagttttttaagaagggacaaaaggtgggtgaattttctggagccaataaggaaaagcttgaagccaccattaatgaattagtctaatcatgttttctgaaaacataaccagccattggctattt

SEQ ID NO: 1397 - DNA, 180 bp, Homo sapiens
ctgaagactgcaaacaacctaattcattttccgagtttgctcaagcctccaggcaccagtcaaatatcgaagtcgtataaaaagtaggtctttacccatttgtagccagctccagaatggaactaatttagaaccttcaatttctgtccagttgacagcaatttctgctattggaatttt

SEQ ID NO: 1398 - DNA, 231 bp, Homo sapiens
ccacggggactgttattcgcaagctggttttctagacctgttagctggaagcatggtgagcaccatttctggacgctcaggccgtgtcgggcttcagtcatctccaccacacaggtacagcagcgctttctggtagtcgcccttagtgtcttgctggatataatagtacagggacttgccgtactttctcttgaattcagacctaattttcaacatgtccacttcactgcg

SEQ ID NO: 1399 - DNA, 408 bp, Homo sapiens
  misc_feature 74, 107, 123, 271, 280, 291: n = A,T,C or G
tttttttttttttttccaccaaagtttatttctctgaaacaatcaccagttgctgtcctctatggcacactganagccccaggagggtctttaactcccttcctcanattatattcatcccanaaatatagccttggacaataatttggttacagcatagtcccaggaatgaggtcccccaagttgctaagttttacataggggagactgggaaattcaaagaattggatggagaaaccataggatccaagataatgtcagggggttgaanatgttgganaggcatggtancatcattgagtttgaatctccttctcacttggagtggaagttgtaggattctgcctctaggaaatgtgccatccttctgaataattggacccaggaagaggagtgtaactagagtgg

SEQ ID NO: 1400 - DNA, 548 bp, Homo sapiens
  misc_feature 510: n = A,T,C or G
aaaatcttattcaaaatattaaataatagtttcagatatgaaaaaaattactgcaataaaacggttcaggggtatttccattgtgcttcccttccctattaggaaagtacactgtccgcccaagagacaggatggacggccttcttccagctctacataaagcgcaagcccactggctcacccgggtcccgcttaacatatattagggctatgttttctaaaaagctgtagtgacacttgtaagtcaaccatggttcaaatcacatatttacatattgatcaattctttatgatagaaagacagacataaatgaatcccatagtaaatactttccagttgccataaaaaacaaaaacaaagaaaacaagtgtgggggaaaaaaggtaattgtacacaaatatcctttatgtatacaaacaacttcattcaggtataattttaatttgaaagacctaggtacagtattatttaagtgataatgacccctaagatttattcaaatttactgnaaaataataaacgaagtaaacgaatctgatataatttt

SEQ ID NO: 1401 - DNA, 273 bp, Homo sapiens
aaaatgatttaattgacaaattcttgtgatttacatttcagtaatcaactgcaaaagtgaggaagtaattcatgggcctgtagtgcttttgaaaataatatttatgactcataaaaatgtacattcataatagtatgacatggacatattttaagaaagttcaagcatatacaagcattgtttaatctcacaaaatatattaattttgttgggaatatgtgcattataaaagggtctttagtttaccaaagggttcaacactaagctattttt

SEQ ID NO: 1402 - DNA, 539 bp, Homo sapiens
aaagtgcgagctacaaataggttgtatccttaatgaaaaaggcttctttctaaaagaagtatgagatagctatccaatactgcaggaacagttatataactaaccgaaggaaccagcagcactctgctaactctgttttagtgtagcaacctccttcttggtgttctactaccagccaaacatgtactccattgctttggatacaagactttcatctttttttggcgtttgtctgtcagaaataacctgataatcactagtagaggctttgtatgctgtagcaagaggtctcatggtagaaatcctaggagtacttccaggttgtgttggtgtacctagagttttgattggtggtgtaaaggctaaagatggagatgataaagcacatctgtcactgctttccataacacttttgtcaatacatggttttacaccaatcatgatggattctccaaaaatcctcccatctttgcttaaggctttccgagcctgcagtttagattgataacgaatatgcatccaatttcctgtattagaca

SEQ ID NO: 1403 - DNA, 374 bp, Homo sapiens
ccttgcagataaataatggagcatgcagtgagcacatctagctgacgataatcacaccttttcccccgtcttttctgaaaaattgtaaatctgatcatatcaacatgtatgaacttaaaatatggagaatgttatggaagaaatagtttataagtttgttaagtacttataacatggtttatctttttgattattaattttttacctaaccattgtttctgtagttaaaattgttttcttggtgttatcttttctcagaataaaattagaaacttttgatggaaagtaggttgttttattttctgtatgacttttgaatatttgtacttttgagaaaattattagcaccaagcgtttctcaaaatataattttt

SEQ ID NO: 1404 - DNA, 329 bp, Homo sapiens
ctgtctcacactttacaagctgtgagagacacatcagagccctgggcactgtcactgcttgcagcctgagagtagctccctccttttctatctgagctcttcctcctccacatcacagcagcgaccacagctccagtgatcacagctccaaagagaaccaggccagcaatgatgcccacgatggggatggtgggctgggaagacggctcccatctcagggtgaggggcttgggcaaaccctcatgctgcacatggcaggtgtatctctgctcctgtccagaaggcaccaccacagccgcccacttctggaaggttccatcccctgcagg

SEQ ID NO: 1405 - DNA, 315 bp, Homo sapiens
aaaaacaacttaataaaaacttacactcttttatacaagagtgtatttcctcttaattaggatggatgttgattaaactcgagatacagctttttgcagtatggtgggttggttttggtgtaacgtcttcaacatgtcgcactggctatcaaagaataagaaaattattgagtatgagtgtgttttataaactttctgagtttttcagatgtcttaatatttttaatagaacttaataaaatgtctagattgaaaaaaaataatttcaaagttttgacagaaactgctaagcaaaatttttaagcaaactgcttt

SEQ ID NO: 1406 - DNA, 72 bp, Homo sapiens
aaaaactttaatttccttacctgatactaataccagtatgatttttagacggaaaaactaagagtaagattt

SEQ ID NO: 1407 - DNA, 246 bp, Homo sapiens
cctacagacttatttcttcttggacacacccacggtgcggccacggcggccagtggtcttggtgtgctggcctcggacacgaaggccccagaagtgacgcagccctctatgggcccgaatcttcttcagtcgctccaggtcttcacggagcttgttgtccagaccattggctaggacctggctgtattttccatcctttacatccttctgtctgttcaagaaccagtctgggatcttgtactggcg

SEQ ID NO: 1408 - DNA, 300 bp, Homo sapiens
ctgtcagagtacggctcctgggacgcttttgcttattttttgtacggctttttcgagttggcttaggcagaattctcctctgagcgataaagacgacatgcttcccactgaactttttctccaattcgcgtactagccggacttggattttctggaaagatttcagttgaggaacgggaacaaagattatgatagctttccgaccaccaccaacttcaatttccttagctgccgtaatattcagctccctgagctgagccttgaggtccgagttcatctccagctccagaagagcctggg

SEQ ID NO: 1409 - DNA, 339 bp, Homo sapiens
ttagaggtggggagcagagaattctcttatccaacatcaacatcttggtcagatttgaactcttcaatctcttgcactcaaagcttgttaagatagttaagcgtgcataagttaacttccaatttacatactctgcttagaatttgggggaaaatttagaaatataattgacaggattattggaaatttgttataatgaatgaaacattttgtcatataagattcatatttacttcttatacatttgataaagtaaggcatggttgtggttaatctggtttatttttgttccacaagttaaataaatcataaaacttgtaaaaaaaaaaaaaaaaaaaa

SEQ ID NO: 1410 - DNA, 293 bp, Homo sapiens
ccaaaggccggagaaaccattgtggaattgcctcagcagccagctaccccactgtgtgagctggtggacggtgatgaggaaggacttgactggggatggcgcatgcatgggaggaattcatcttcagtctaccagcccccgctgtgtcggatacacactcgaatcattgaagatccgagtgtgatttgaattctgtgatattttcacactggtaaatgttacctctattttaattactgctataaataggtttatattattgattcacttactgactttgcattttcgttttt

SEQ ID NO: 1411 - DNA, 528 bp, Homo sapiens
aaaccaaaattcaaggcagtactctgtcagcaattacaacttttaggtaaattacatgggtcaaaagtagcacaatttgattttatcatagtatgtttggggtatctgcgaaccattctagtgatagagctatgagaactggtcaacttaagagttcaaccatgtgaaagggagtaatttccagaaaattcttgaacagaaaagggcagtaaacaaaagaattattgaattataatagttgccaatacagatttcctttgctatttaattattgcaccaacgagatatgggcagtatggatatcttaccaacaatttcttccttaacaactacaggtttcttaattgactatgttgcctttcaaataattgcacgcacgatcacagctttctaaagacagaagagagaggaagtgaagccttgattcgccatctcaatccaaaagcagcaaagatgctcaaaccacaacaaagatttttaacactactgttttttttagttctatatacagaaataaatataaatggg

SEQ ID NO: 1412 - DNA, 488 bp, Homo sapiens
ccacagacgtcattcgctggactccctgggcactaaatgagtgtctagcgtccttaaggctgctcaacacacagccccagactctgaatatgattccaagaaatattctgaaaaaagtcacatcgctggaataaacagtttcccaagataactgctttgaaaaccagtcccgttagtttctaaaagcccacctacggcaccttccttccatcagagcctgctgcccgggtgggctgggaaggagggagatacaaagaagaaagtaggcatgatcactgggtcggttcccaagccaccctcaccctccaagaaggcatgaatggaacaaccccgagaacagagcacgtgtgaagaaccaacacgacaggcacgggatggcagcactggtggaagggagacaaggaggccgccagtgccaaggaggagagggggcacaagcgcaggcagggaaggtggcaccaaaacctagtaagaacaaagcaaaacca

SEQ ID NO: 1413 - DNA, 137 bp, Homo sapiens
ccagcttgacggtatccacccattcggggactttcagcttcccggactttttgaggaaggctgccagagctctgacgaactcctactggttcacgtcttttacagtaactccaggcatcgtgcggcctccgcgctgc

SEQ ID NO: 1414 - DNA, 173 bp, Homo sapiens
aaaggagcatctcagttacgtgtggcggacaaaaaaaaggagcagactgtgacagaccattcccatcggccaagtggtcgaacccgacatccaagacccagcgagcagccaagctcagcgcaacctccgggcttctcgctctgactccaaaagggtgagcacgtcgccctcgc

SEQ ID NO: 1415 - DNA, 314 bp, Homo sapiens
aaaaggacaccgcctgtaactataaattctagcacttagtcatgatagccatatacttcaacaaaacattttacatcaagaaatcataagatatattgaaactattttcacatttgcctacttttcctttttctgttttccttttaattatacaaatgctttatggaataactgtctggagtagacaagaggaaaagtactatgaacataaatacaaaaataaaattctggtatccattaacattctctgttatggagaaacattattgcaaatgtgctaatattttcatcacaaattgtgccagtacatgttt

SEQ ID NO: 1416 - DNA, 393 bp, Homo sapiens
  misc_feature 374: n = A,T,C or G
ccactagaggtctgtgtgccattgcccaggcagagtctctgcgttacaaactcctaggagggcttgctgtgcggagggcctgctatggtgtgctgcggttcatcatggagagtggggccaaaggctgcgaggttgtggtgtctgggaaactccgaggacagagggctaaatccatgaagtttgtggatggcctgatgatccacagcggagaccctgttaactactacgttgacactgctgtgcgccacgtgttgctcagacagggtgtgctgggcatcaaggtgaagatcatgctgccctgggacccaactggtaagattggccctaagaagcccctgcctgaccacgtgagcattgtggaacccaaagatganatactgcccaccaccccca

SEQ ID NO: 1417 - DNA, 512 bp, Homo sapiens
ctgcgcgcgccccccagtcccgcacccgttcggcccaggctaagttagccctcaccatgccggtcaaaggaggcaccaagtgcatcaaatacctgctgttcggatttaacttcatcttctggcttgccgggattgctgtccttgccattggactatggctccgattcgactctcagaccaagagcatcttcgagcaagaaactaataataataattccagcttctacacaggagtctatattctgatcggagccggcgccctcatgatgctggtgggcttcctgggctgctgcggggctgtgcaggagtcccagtgcatgctgggactgttcttcggcttcctcttggtgatattcgccattgaaatagctgcggccatctggggatattcccacaaggatgaggtgattaaggaagtccaggagttttacaaggacacctacaacaagctgaaaaccaaggatgagccccagcgggaaacgctgaaagccatccactatgcgttgaactgc

SEQ ID NO: 1418 - DNA, 351 bp, Homo sapiens
ctggctggcctcagagcgttacatgcaactcgggtgaaaacatttttacatgacacagacacacaatgggctttacctctggataaacttagaaactttccatccaaacgaaaagggtgtatcttctgtatgttgccaagaagcctaaactgagtacaaggacgatcttactttaatcaagttccagaatgagggtacacagcttcgaaaagcagtctgtagcagaagatgcaagggtgtgtgtagccatgtttccagaatataccaaaggaaacacacacaaccccagtgtggccttttgcgaaccctcgatgctgctccatactgggggcaggcggctacttcgtccag

SEQ ID NO: 1419 - DNA, 438 bp, Homo sapiens
aaattccattccaacaaagcaaccaaaacaactaatgtctagttttttagcttctggggaattaggttcccaggtaagaactgaaaatggagaaaaaattgtgttgccatctttattcagaaagtcattattttcagcaaaatggagctgaggcagaaaatccaggttgcaggactgggaaaaaaggagtgtctgccccatgggacacttataaattgttcactatgacagcagccctttctagaggtattaatgtcattaggttgtgataattctccagaaaccccaacagccctggattaagaacatctggaaattgttcagatgacacaaatttctctgtttcctgctgttaaggcttccgtgatgcctctctgtggcatctaccacctccatttttttcttttcaaacctcctcctttcaaatcaggaagtata

SEQ ID NO: 1420 - DNA, 468 bp, Homo sapiens
ctgatgaaaaagatgccccatttccgaaaacagattactaagcaagttgtccatcttaacttagcagaagattgcatgaataagttcaagcttaatatagaaaagctctgcaaaactgaacaggacccggcacttggaactgatgcagaaggacagaaggtgaaagattccatgcgagtactccttccagttctactcaacaaaaatcatgataattgtgataaaataagagcaattctactttatatcttcagtattaatggaactacggaagaaaatttggacaggttgatccagaatgtaaagatagaaaatgagagtgacatgattcgtaactggagttaccttggtgttcccattgttccccaatctcaacaaggcaaaccgttaagaaaggatcggtctgcagaagaaacttttcagctctctcggtggacaccttttatcaaagatattatggaggatgct

SEQ ID NO: 1421 - DNA, 473 bp, Homo sapiens
  misc_feature 433: n = A,T,C or G
cccgaatcaaagatatggagaagcagaagaaggagggcattgtttgcaaagaggacaaaaagcagtccctggagaacttcctatccaggttccggtggaggaggaggttgctggtgatctctgctcctaacgatgaagactgggcctattcacagcagctctctgccctcagtggtcaggcgtgcaattttggtctgcgccacataaccattctgaagcttttaggcgttggagaggaagttgggggagtgttagaactgttcccaattaatgggagctctgttgttgagcgagaagacgtaccagcccatttggtgaaagacattcgtaactattttcaagtgagcccggagtacttctccatgcttctagtcggaaaagacggaaatgtcaaatcctggtatccttccccaatgtggtccatggtgattgngtacgatttaattgattcgatgcaactttcggagacagga

SEQ ID NO: 1422 - DNA, 518 bp, Homo sapiens
ctttagaactaaataatttggacaaggcttaatttaggcatttccctcttgacctcctaatggagagggattgaaaggggaagagcccaccaaatgctgagctcactgaaatatctctcccttatggcaatcctagcagtattaaagaaaaaaggaaactatttattccaaatgagagtatgatggacagatattttagtatctcagtaatgtcctagtgtggcggtggttttcaatgtttcttcatggtaaaggtataagcctttcatttgttcaatggatgatgtttcagatttttttttttaagagatccttcaaggaacacagttcagagagattttcatcgggtgcattctctctgcttcgtgtgtgacaagttatcttggctgctgagaaagagtgccctgccccacaccggcagacctttccttcacctcatcagtatgattcagtttctcttatcaattggactctcccaggttccacagaacagtaatattttttgaacaataggtaca

SEQ ID NO: 1423 - DNA, 340 bp, Homo sapiens
ctgcccctgaaggatgccagtactgtggtgtgtgagtctcagcagccgcccacacgctcctaactctgctgcatggcagatgcctaggtggaaatagcaaaaacaaggcccaggctggggccagggccagaggggaaggccctggattctcactcatgtgagatcttgaatctctttctttgttctgtttgtttagttagtatcatctggtaaaatagttaaaaaacaacaaaaaactctgtatctgtttctagcatgtgctgcattgactctattaatcacatttcaaattcaccctacattcctctcctcttcactagcctctctgaaggtgtcctgg

SEQ ID NO: 1424 - DNA, 453 bp, Homo sapiens
  misc_feature 412, 430: n = A,T,C or G
ccaacactcggtaggcagaatgatcacctccgttgtttcaggtactctgtgtttatttatgcaacagttcatgtaaaatggagacgaggccagaagaatccttgagcagacagagccagttgggcctcctaagtgaccttaaccttgcttgatttgcaagcatgtctgaaactttatttgtggtatttcttgtaaatgcctatgttaaagaaacacagaacttaagctcaaccaatcagaagcagccaacaaaaacgtaattagtaactaggacttcctcatgggatagaccaaataaggcaactgtataactgtgtgactgtataactgtaaccaatgaaatattatctttgcttttatctatttgtcctaaaaagcctcctcctcatgttctctctggggagctccctanccacttctggatcactgntcaaataaactcttaaatatttt

SEQ ID NO: 1425 - DNA, 387 bp, Homo sapiens
atcttgtgctgtgctatccgcaggaaccgcgagatggtctagagtcagcttacatccctgagcaggaaagtttacccatgaagagtggtgggattttttgtttgtttgttttgttttgtttgttgtttgttgtttgtttttttgccactaattttagtattcattctgcattgctagataaaagctgaagttactttatgtttgtcttttaatgcttcattcaatattgacatttgtagttgagcggggggtttggtttgctttggtttatattttttcagttgtttgtttttgcttgttatattaagcagaaatcctgcaatgaaaggtactatatttgctagactctagacaagatattgtacataaaagaatttttttgtcttt

SEQ ID NO: 1426 - DNA, 382 bp, Homo sapiens
  misc_feature 46, 51, 61, 64, 74, 98, 103, 201, 220, 259, 267, 271, 295,299, 322, 325, 327, 334, 342, 349, 351, 358, 363, 364, 375: n = A,T,C or G
caagcttttttttttttttttttttttttttttctaaaatgccaanataanaaacgatttnttntagagagaanaaaaatttctcatccaaaatatanaaatntgtacaactttgccacaatcaatatacatgaactgtacaaatttacaccagttcataatttaccaaataaaagatgactaacaaagttcacaaaatanatgggggtttggggaaaanacttttacccaattaagtacaaggaaagttacaaaccanacctccantttntaaaaataaaaagtttactcagtnttanaaaactacaagctagcaaatgtncananagctggntggtgctnacaccananttgaaanagggnntttttaagggnttttttt

SEQ ID NO: 1427 - DNA, 483 bp, Homo sapiens
  misc_feature 316, 344, 448: n = A,T,C or G
accgtatagttttctctattctttcatttcccccttccccattcctttattgtacataaagtaactggtatatgtgcacaagcatattgcattttttttttttttaactaaacagccaatggtatgttttgattgacatcaagtggagacgggatggggaaaaatactgattctgtgaaaataccccctttctccattagtggcatgctcattcagctcttatctttatattccagtaagttattttgctctcactgttttaacaaaaaaaaaaaacaacaacataaaaatccttgcataccttgttcaattgganaattttaatgtttttcatttatcattgnaaaaccaaggacaattttataacttttttgtacgtagctgttacatgtagggcaatctgtctttaagtagggataaattactctaaaacaaaaaagaatcctanatagttttcccttcaagtcaagcgtcttgttgttt

SEQ ID NO: 1428 - DNA, 290 bp, Homo sapiens
  misc_feature 92, 96, 232, 238, 261, 264: n = A,T,C or G
gttatatgggttggaggggtctggtggagttgtatatactgaaatcacatggactggtccattatgacatcttaccaactttaggtcactgnacancatgaaaacgcccgtggggcaggggccgattcctggataccctcccagtctgccctagaaagggaagtcatcaagatctgtgctgaccaggtcccggtgggcatgggggctgcatgccacttgggggtcaggagtnttaacnggtgctttggggttgccgctgantanaacaggctaaggtggctttggaagca

SEQ ID NO: 1429 - DNA, 140 bp, Homo sapiens
cgcctgcgcgcggctacagcacggttcgtttttcctttagtcaggaaggacgttggtgttgaggttagcatacgtatcaaggacagtaactaccatggctcccgaagttttgccaaaacctcggatgcgtggccttctgg

SEQ ID NO: 1430 - DNA, 412 bp, Homo sapiens
  misc_feature 134, 160, 176, 191, 235, 245, 278, 315, 337, 389: n = A,T,C or G
ctgagggaggggtcagggtgggtgcgcggtgacggggagggcaaaggtggtgtcagtatcttcattttgaggattggggttcagagcacttctggggtgtcagctcctccttgtccccccgtggggctccgtangactggaaagaggacatgaagagctntgacagagagcagcanaaactctggaactgnttccagagggcctgcactgcatggaccagggccaccaccttctncttcacccangccagaaccccgtgccaccaggtctgcagccgntgcagcatggcctggaaccatctcatgaccttgtcanaaaagctctccccaggctcctnggttgcgggatcctcaacatccgggacaggggatctgttgcctcggcaccgnaatccatctctttctttttcaag

SEQ ID NO: 1431 - DNA, 484 bp, Homo sapiens
ccaacatggtgaaaccccgtctctactaaaaatacaaaaattagctggatgtggtggcacacacctgtagtcccagctagtcaagaggctgaggccagagaatcgcttgaacctgggaggtggaggttgcattgagccaagatcacgccactgcattccagcctggtgacagagcgagactcagtctcaaaaaaaaaaaaaaaaaaatttttcttcctaaattagtcacgcatagcggttcgttcgcaattcaaaaataattttatgagtagataagaatatcagtttaccgttgtctagtgattttatctaaattttccctgaattattaagtaatattgatttggctttgattctgaagtagtagagtctttaccattataaactgtaaatctctttttgcttaaaaggaaaaaaatgtaaaagataaattccacagagaattattcagtattacattaaaatgttaatgactttttatttt

SEQ ID NO: 1432 - DNA, 446 bp, Homo sapiens
attgagtttttccagggaagtcattcctggactcaagggagaaaaaatgaattcattccacaggctatgtaacaatgcaagatgcatgaaagttcttagtttggatgaacatatccgctattattcttttctggtaaagctgtcccaacaggaatcctctgacaaaaagttgaaatcctaggcttctccaccagatatttttatcaatgcccactctctagttacctggatatcctgttcttgcagccagattcatatttgtatgtggttagtccaaggagggcaaattcgctcgtagattatatactttcaaacacttgttacttgtttcaaagtccaggcattaaaacaattttacactatttgcgtactagaaaaaatggaaaataaaaagtcgagataaaaacaaagaaataaaagaacatttgagaaattattgccttgat

SEQ ID NO: 1433 - DNA, 474 bp, Homo sapiens
  misc_feature 461: n = A,T,C or G
aaatttttaaggtattgcctacttttctttagaatgcagaaatctcgtcctgagcccttattatgcctgtggtagagcaatgcaagactgaaaaggttgccagtattttcaggcttatttgactaagaattagtgccaagaactggaaagtctactttttggagggaaatgatacttagaatttgtaaacataagcagtaatagtgtaaatatttagaaaaatagcaagtgctttaactgctcaataaaatagtatagatgttatttcacccttaaggcactggctgttgcccattattttccgatttcgtgattactgtatatattacatttgagtaatgaataattggtaatagtgtattatagtgttctacagcacaccttactgtacagtatttgaagttttcttttatatcaataataaaactataagttaatactgattttcccctgaaattctncacattagctttt

SEQ ID NO: 1434 - DNA, 423 bp, Homo sapiens
ctggagaatctggcctgagagccttttcttagtgctagctctgaaattccatctaccccctatgtttatgtctctccctgttggactgttccatcagctttatatcctcagtccccaacacatagctgcagcctagcaggtgactgtaagtgtctgttacactgatctaagctaataagaacctctaaatatgagggaaggaagaagaacttggtgtcttgtcaagtaagatgaaattcattctgtagacaaattgaacttacactatctacaattaattgacagggacactggatgtttaagaaagtcttccatagtgtacccacctcactatgctagaagttttcttcagcctcttgctataatcttactcagaaagatttgaaaataaagcttacctcctaaggaattcaaatttacttt

SEQ ID NO: 1435 - DNA, 435 bp, Homo sapiens
aaagacacattcctgttactcacattaatccatctccctcacgtttcaggtttgctggaaggaaaagtagagaaataatggagtagagaagtgggagaatccagatgaccatctgaaatcacattactgaaaatacaacagacatgacccaaaaatctgatcttactagtttccttcaggatcaaatccaggatattttattgtacaaaaatttcaaatgatttcagatgatgcatatgtgacagcaaacctgaatggcacaatggaacacagacttaaaagatgcttcagtggtcaacactcatcctggagttctcatgaatgaagggtagacagattcagtaaaattgtttgcttttcagtttcattatctggtcttcaaatttcagcacagagcaattcatttccatatagtaatatgtaaagagagactac

SEQ ID NO: 1436 - DNA, 108 bp, Homo sapiens
tcctttccaagctcctcgtgataatgcagacttcctggagtacaaacacaggatttgtaattccttactgtaacggagtttagagccagggctgatgctttggtgtgg

SEQ ID NO: 1437 - DNA, 351 bp, Homo sapiens
  misc_feature 42, 51, 65, 68, 71: n = A,T,C or G
gcaacagtgttctaactattaacgctacgatgcctgaaccanctaagtcanctcctgctccgaanaanggntccaagaaggctgtgaccaaggcgcagaagaaggatggcaagaagcgcaagcgcagtcgtaaggagagctactccgtgtatgtgtacaaggtgctaaaacaggttcaccccgatactggcatctcatccaaggccatgggcatcatgaattccttcgttaacgacatcttcgaacgcatcgcaggcgaggcttcccgtctggcccactacaacaagcgctcgaccattacctccagggagatccagaccgccgtgcgtctgctgcttcccggagagctgg

SEQ ID NO: 1438 - DNA, 300 bp, Homo sapiens
aaaaaatttggatttttttatatataactagctgctattcaaatgtgagtctaccatttttaatttatggttcaactgtttgtgagactgaattcttgcaatgcataagatataaaagcaaatatgactcactcatttcttggggtcgtattcctgatttcagaagaggatcataactgaaacaacataagacaatataatcatgtgcttttaacatatttgagaataaaaaggactagcaaataaaactcattttgcatttttttgtacaagctttttttttttttttttttttttttt

SEQ ID NO: 1439 - DNA, 344 bp, Homo sapiens
ctaccacaccattgcatatttgacaccccttccccagccaaatagagctttgagtttttttgttggatatggagttactctttccatggcttacaggttgctgaaaagtaaattgtacctgtaaagaaaatcatacaactcagcatccagttggctttttaagaattctgtacttccaatttataatgaatactttcttagattttaggtaggaggggagcagaggaattatgaactggggtaaacccattttgaatattagcattgccaatatcctgtattcttgttttacatttggattagaaatttaacatagtaattcttaagtcttttgtctgattttt

SEQ ID NO: 1440 - DNA, 418 bp, Homo sapiens
  misc_feature 407: n = A,T,C or G
cgctgacaccggaacggcagcagcaggacgattaagacaaggaggatggctccacagacgctcatgagcgcataggacacaatccacaaaatgggctcgctcaaagactgagcggggacacagttgctggctacatcctctgttgagaaaggcccggaaatttcagacactgcagcacctgcaatttctgcacaggggctcgctgcgaagcccaccctcttctgggctctgtcgaagatgacgtagaagccctccatcaccgtggcaccgatcaccagcgcatttgtggatggggaaatgccgaatcggtaacattcataattcaggccggcccccatcatgggctgaatgtaaagctgaggcaggattgtgatacggaatgacctgctggagttctcgtctctcangtagatggaga

SEQ ID NO: 1441 - DNA, 390 bp, Homo sapiens
  misc_feature 67, 86, 147, 189, 238, 262, 328, 345, 351, 353, 363, 386: n = A,T,C or G
caagctttttttttttttttttttttttttttttttagtttaggtatgtgtctgaattttatttaanatagatgaacgtggatatntagttatgcatttgggcctgaattttttttctagttgttcttttcactgagctttcccaanaatccccccagaattaaaaaaaaaaaaaattactatctcctntccctggcatataaaatggttgggattagatttaccaaaccattacatntcccttttgtctgcctgcaaacanattttccaatccataggcccaaagtgaactcccacgtggagtaggattaaaacccacagcatctanatcttcaaattctgganaaaaananagtgtgaaanactgctcatggctggggtgaaantcaa

SEQ ID NO: 1442 - DNA, 434 bp, Homo sapiens
  misc_feature 190, 379: n = A,T,C or G
aaactctttaatactgagatgggctagatgtgggtaagagagaattttattacattccaacctggaaatttctaataaatttacagtgttgacacagatgcctcaaatcttatttggtagacattttaagaatattaatatattgtaagggaagttaaaatagaactatcagtctgtgtgaaatgttttnttggtaaaagtcaaactctttgtttttatttcacagacaattgtggcaattaataaagacccagaagctccaattttccaagtggcagattatggaatagttgcagatttatttaaggtagttcctgaaatgactgagatattgaagaaaaaatgaatcaggatcatgccttaaaaagaaaacttttgntaaagtattccactgaaatcacagatatttgtgggtattataacaatcattggaa

SEQ ID NO: 1443 - DNA, 405 bp, Homo sapiens
ctgcctcctccctctgctccttcagggcccgacacttccctagggaaggggtacccttcatgcctagcgcttccagttctgcccggaggatactcaggcgctccttgtgtgagcaacaggagcccaacagcttcttgtagtttcgatgggcaccacaggcccgaatgtagcgcttcagcctcatcacagccgggtggtcctctccacggcgacctgagccagccttccctcctttggcctctggacttccatctgaggaggaagaggagcttcgtgtcctgcctttcctggagctcttcttggaagagcggttcttcctctccccctgggggcctccccctgcctcgctgtcacttacctccctctccaagtcactttcctcaccactggtgctgcccagtctgg

SEQ ID NO: 1444 - DNA, 276 bp, Homo sapiens
aaaaaatttcttggcagttaaaaggaagtggcataatgagcaggacaggacagttaccggctccccctcagatgcctctggctggcttctcacattctccaagatccagcctctaggctccagtctcggctacctctgctgggcggtagctcacaccccctttggttccccttctgtgctgccttctcatctgcacaaggaacgcgacgctggtgacagcaaaaggaggccaaaaaccagggctaggatgtcaccagcagccaggcaggaattcag

SEQ ID NO: 1445 - DNA, 429 bp, Homo sapiens
  misc_feature 371: n = A,T,C or G
cctttgactggtccccagtggtgacctatgtgtgtgatcttgaagggaacagagtcaagggtccagagaaggaggagaagttgagacaggcggtcaagcaggtgctgaagtgtgatgtgactcagagccagccactgggggccgtccccttacccccggctgactgcgtgctcagcacactgtgtctggatgccgcctgcccagacctccccacctactgcagggcgctcaggaacctcggcagcctactgaagccagggggcttcctggtgatcatggatgcgctcaagagcagctactacatgattggtgagcagaagttctccagcctccccctgggccgggaggcagtagaggctgctgtgaaagangctggctacacaatcgaatggtttgaggtgatctcgcaaagttattcttccaccatgg

SEQ ID NO: 1446 - DNA, 140 bp, Homo sapiens
aaagcgctgatcctgtttatttggcaggaaaacgagacaatccagcagcccaggagggacaggtggacttaatcctcctcctcgtcgtctccagccccagccccaccctggcccttcttggcattcttcctcttcacgcg

SEQ ID NO: 1447 - DNA, 425 bp, Homo sapiens
aaatttctgaacttcttcaatacaaattaaaatagtactggagtcttttgggaggccaatagctagcagctacattaattggtgtagaggagcctccttatcgataaccaggtccaggttgggtatagccctgaccaaagggaggacggttacgcgcataaggattaggcccacttggaggaggggtcatggtacttccaggaagtgaagtaaaacctggtcttggttgataggccccaggttggcttggagccattccaggttgagaggcaggagccacagtataattagtaggctgagaagtttgggcagtgtaagtttgtgcaggataattgctcgcctggtactgctgtggcggctgagcaggcagttgttgaggctgaccagaaaaggcaggagctggtgcctgggaagttggttgctgg

SEQ ID NO: 1448 - DNA, 311 bp, Homo sapiens
ctgacccattgtggcactggtgggtggaatgacattgttgacaaagaaaaacaaggcatcctcagctcggagatgaattcgcttccggatcaaggagtagaactgaccaactgtgagatcagaaggcaccaggtatttctttttgtccaggtcccctatccgagctttgggagccttttctactatcaccggcacccggtccgggtatttctttcggatcttctcgccctcagagcggcgcttctcgaacggatgctcttctttgtacacgaacttcatcctcccgggaaccgggctggacagggctgggc

SEQ ID NO: 1449 - DNA, 105 bp, Homo sapiens
  misc_feature 32: n = A,T,C or G
atatgttcttgttaacattgtatacaacatanccccaaatatagtaagatctatactagataatcctagatgaaatgttagagatgctatatgatacaactgtgg

SEQ ID NO: 1450 - DNA, 562 bp, Homo sapiens
  misc_feature 546: n = A,T,C or G
caaaggctagaattacctcaaaaatagtcttgaaataatactgagtccttctaaagagctcactggatattttaataacatttacagaaagacaaaatttgcagtagctgagtttaagtgaagaataatgtagaactaacgtgggctaaaatgtttcataattaatgtcaaaaattgccaagattattaatatatattttggtaatcactattgaccaggttaatttttttgtgcaaaatacactatgtattaatagaacaggaaaataattatttcagaccactaacaaaagaaaacccacagcaagagaagcatctgtagggcaattaaacgttagggaagtttactagctttagaatacatcaatatacttcgataaacaagagtgttttaatgtacttttagtaacgacccaatctaaggagccttggaggcttgtgaaaaagacgtccacaaagatgctgcatttctagtgtggggtgaattaaaatacttctgtaagaaggagggaactgaatcaccttcagcatgaataaacagcattnttcttttacctcggcc

SEQ ID NO: 1451 - DNA, 418 bp, Homo sapiens
ctgttctggaggctgtggaaaacaatactctaagcattgaaccagtgggattacaacctatccggtttgtgaaagcttctgcagttgaatgcggaggaccaaaaaaatgtgctctcactggccagagtaagtcctgtaaacacagaattaaattaggggactcaagcaactattattatatttctcctttttgcagatacaggatcacttctgtatgtaacttttttacatacattcgatacattcagcagggactcgtgaaacagcaggatgttgatcagatgttttgggaggttatgcagttgagaaaagagatgtcattggcaaagctgggttatttcaaagaggaactctgatgctctgcgtgggaccatgcctgaactccccgaataactgaaaaatggctgaatatttttat

SEQ ID NO: 1452 - DNA, 257 bp, Homo sapiens
  misc_feature 202: n = A,T,C or G
ctgctgcgacccggaggcaccctcgccgtcctcagagtcctgtggcgcgggaaggtgctgcaacctccgaaaggggacgtggcggccgagtgtgtgcgaaacctaaacgaacgcatccggcgggacgtcagggtctacatcagcctcctgcccctgggcgatggactcaccttggccttcaagatctagggctggcccctantgagtgggctcgagggagggttgcctgggaaccccaggaattgaccctgagtttt

SEQ ID NO: 1453 - DNA, 318 bp, Homo sapiens
cctcctggtcatgtcccaggtcatggagaagcccgtgccacagtgaccctccccatactcctgggggggctgctctccatcctggatcgtaaggaggcatcatcaggctgtgttcctggaaccccaataaccctgggcccccagggccagcctgttgtagagggaggctatctgaccgccggtctggcagaggaaatgggtgggcagctcccagacaccccaaaggacccggttctcttcccagagcgtcctaaggttactcttggaacctgatctttgttccctcatcccagggaaatgacacactctgtatttctg

SEQ ID NO: 1454 - DNA, 470 bp, Homo sapiens; identical to SEQ ID NO: 163

SEQ ID NO: 1455 - DNA, 206 bp, Homo sapiens
caatatattaccagcaagaataaaaaagaaatccatatcttaaagaaacagctttcaagtgcctttctgcagtttttcaggagcgcaagatagatttggaataggaataagctctagttcttaacaaccgacactcctacaagatttagaaaaaagtttacaacataatctagtttacagaaaaatcttgtgctagaatacttttt

SEQ ID NO: 1456 - DNA, 419 bp, Homo sapiens
gtcactagcttatcttgaacagatatttaattttgctaacactcagctctgccctccccgatcccctggctccccagcacacattcctttgaaataaggtttcaatatacatctacatactatatatatatttggcaacttgtatttgtgtgtatatatatatatatatatgtttatgtatatatgtgattctgataaaatagacattgctattctgttttttatatgtaaaaacaaaacaagaaaaaatagagaattctacgtactaaatctctctccttttttaattttaatatttgttatcatttatttattggtgctactgtttatccgtaataattgtggggaaaagatattaacatcacgtctttgtctctagtgcagtttttcgagatattccgtagtacatatttattttt

SEQ ID NO: 1457 - DNA, 164 bp, Homo sapiens
  misc_feature 124, 128, 136, 142, 149: n = A,T,C or G
ccaaaaggagacttgtaaatagcgtaaagtggtgtcttatgctaaacggtggaatgtataggcagagaagctctttgaagttgtcagatgagctgggctcacaagcctgattcaaacaggctgncggnctcctctnaccccntaatacngtgcagcccaaactc

SEQ ID NO: 1458 - DNA, 346 bp, Homo sapiens; identical to SEQ ID NO: 1007

SEQ ID NO: 1459 - DNA, 608 bp, Homo sapiens
  misc_feature 607: n = A,T,C or G
ccaaaggaagagagtggcagtaagctggcttttccaatgtgtcacacaatccttcatgccattaagttctccttgttggaaaagaaattaggttgttttgataacttagaaaagttagttttagacaacagtgactttcagctacaaatacaaaatcaaatccatgtatataaggcttctgtaatcgatgtcttagaggaacatctgctcattttctccaagccccagtcctataaatcaaggcaagtcaagtaattaagcttcaactattttggcagctttgcaattaaaatgaacaaagcactatatctatccttccatatactgtatatattatagttctatcttgttacaccaaatctcacatgcagagagactaaaaatatccattttggtttcaggtataattaaaagccaataagggtcttgcatactattctttttcccctccccaaagtgaattctccatcagatttactactccctgactcaattatatttacctggaatatctgaatgcaggtatttatcctctcagaaaagaatatgtttacctgggatctaaacatactgtacacgaatatacataactgcaatacagcactgnt

SEQ ID NO: 1460 - DNA, 263 bp, Homo sapiens
gttcagctttcctttctaactatactgtactaatagtgcaaatcatagcaagccttatccatagctctacaaaatgaatttctcagtgtgccaatatcataaaaatatgaattatattacactaactatagagttcagtagaaataaattcttatctgtaacttttctgttatttagtatattcagccataattttggaattagtgcttcaatctcaattttcatattacatgtatatattaagaataatccaattggatttt

SEQ ID NO: 1461 - DNA, 228 bp, Homo sapiens
aaatgaaatcttcgaaagaataaatttgcttttcagtccactgtattttcaaaattgattatcaccaagcttggatgaaagctgtgaaccacaaaccatttgtttatttaatagaaaaaagaatgtgtagattattagcaaagtaatgccttaaaatgtatcttcacacagttgaaattttagtataaacttgtatatcaagttgctttccattatttattctacttt

SEQ ID NO: 1462 - DNA, 567 bp, Homo sapiens
ctgatttgttggtaagccgcactagaaaggtatacatagtaatgtatatttatttacatactgaagtcctaaatttatattagaaaaatgtaaataatcgggggtaaacatttttgaagatttattctttttgtgttgctggggtgtatacatttatgtctttgtgaaatacactggtggtgtccttcttacaaaacttttgaaataaaaaaaaactcaaatcttcactgtctgtgaaatccccttcagtcttttcagattgcattgactgtcctcttgatttttcatattacatgtcaaattacttttgctatcataaataagctccaaagtcccccatttaatttttttttaattttgtgtatgatgggtttcagatctggcttttgttaacattttggggcttttttaatcttttcaatctggcgtattgctgtttgaccttttgcaaggtacttaatcaattgctcttttgttatagggtatggatcattgtcagaacttgattggaggggtttctgctccaggttacggatgaggctgctgtgcgcctgtaaattggcatgc

SEQ ID NO: 1463 - DNA, 586 bp, Homo sapiens
aaagatgaggttttgaaaagccctcagaggtttttgttaaaagactatcttgcttaataaatgacaacttgttaacagattcacacattacaagtaggacagtataacaggagattggtgtgtgaatgctacaaaacagtcagcaaaaggaatcatgtttgcttgtgaaacttcagaggtaccctgaaagtcatttcctaaagctagtgcatgtgaatcttttccttgaattgtgcagaataattggattgaggcacatattttgaggagtagcaagtggaatggtataatgactacagagaaaattatcttgaaatatagcaaggaagagaaacaagttttctttctccactttattgttggactaattgggtcaatttgctgtgacatatcaaagatctctttgtgccaggccaagactggctactgagttctcaaagcgttttaatatatagattacgtatgagtgcctattttttcctcctcctttcattttttatcttaatacccattttacttctgaaataattcatctgttttgctttatgaccagctttaatttcaattgaggaataataacaaccct

SEQ ID NO: 1464 - DNA, 250 bp, Homo sapiens
cctgtattgagtaatcagtagctatgtgcaaatattaagtcaacttaattaccagacccagaaggccagaggtaatcaaagagtactttcggaagatgaaatatttataatgagttatggaaacaatgttttagaaatgtttttcttggtgtaatttaatgcagatttttacctcaattttgttaaaaaacttgataatttgatccctccatctatttaatatttaatattttcagattctagagtattt

SEQ ID NO: 1465 - DNA, 534 bp, Homo sapiens
acagcctgtttcagagggttgttttgtttggggtgtgggtgttatcaagtgaattagtcacttgaaagatgggcgtcagacttgcatacgcagcagatcagcatccttcgctgccccttagcaacttaggtggttgatttgaaactgtgaaggtgtgattttttcaggagctggaagtcttagaaaagccttgtaaatgcctatattgtgggcttttaacgtatttaagggaccacttaagacgagattagatgggctcttctggatttgttcctcatttgtcacaggtgtcttgtgattgaaaatcatgagcgaagtgaaattgcattgaatttcaagggaatttagtatgtaaatcgtgccttagaaacacatctgttgtcttttctgtgtttggtcgatattaataatggcaaaatttttgcctatctagtatcttcaaattgtagtctttgtaacaaccaaataaccttttgtggtcactgtaaaattaatatttggtagacaggatccatgtatctttgctaaggttag

SEQ ID NO: 1466 - DNA, 363 bp, Homo sapiens
gaattggtaagttgcaaagaccttttgaaaataattaaattatcatatcttccattcctgttattggagatgaaaataaaaagcaacttatgaaagtagacattcagatccagccattactaacctattccttttttggggaaatctgagcctagctcagaaaaacataaagcaccttgaaaaagacttggcagcttcctgataaagcgtgctgtgctgtgcagtaggaacacatcctatttattgtgatgttgtggttttattatcttaaactctgttccatacacttgtataaatacatggatatttttatgtacagaagtatgtctcttaaccagttcacttattgtactctggcaattt

SEQ ID NO: 1467 - DNA, 416 bp, Homo sapiens
ctaaattaatgaaacaatttttcatctttaatgaacaaaagccacaagccttattttatttcagcctctaaaattaaattgattgtggctgctgtcaaacacagacgacttcactttggtatccttggatgagtgtagttgtggaatgaaaaactattggttcatttctttaatattaatataagtttttgctattatgtcaaaagtactttccaatcttaatttcttagtgtctggggtcctgggcattgatttccaagttattttatcttagaatagctcatatgagctgaaaaacaatttattctcttattaagcttctttcttcagaaaagtacccaatttagggtctgcattttaagaattattaacaaatatcttcataaaaatttgggaaaaggagtgtggatagattt

SEQ ID NO: 1468 - DNA, 311 bp, Homo sapiens
  misc_feature 84: n = A,T,C or G
aaaggttttcctattctcgataaagcctgtgcgcactgtacggggagtgggggtgaagcgtgttctctacataggcaacacagncgcctaagtcacaaagtcagtggtcggccgcttcgaccaacatgtggtgagcattccacgggcgcatgaagtctgggtgctgtgctcgagtctctgaatattttgataggaagcgacaagaaaattcaaactgctctttgctgactactggaaagtgaaaagatgctcaagtttaccattcaaagaaaccataggcatttcaaaaacctctttctaaactttggttt

SEQ ID NO: 1469 - DNA, 436 bp, Homo sapiens
gagggggtggggactcttgggaaactactcctgtaaaattgaagttggaggtaggcgtgggctgaggaaagaggaatcagattaattctctgggttgcaaagaggctattctgcaagccccttacagtggccctgaaagctcaataagtgttttgtacctcttgtaaatgtgccattgtgtgaagcattaaacccaacatctagaattcaggattcatccagaataaaaggatgtaaaatctttcccaacagaagagtgttacttttggtcagacaacttcatgggttcttactgcacattaaattatgacttatggaacattgcaatatattctcggtccttaagttatgacttatggaacatacaatatattctcggtccaagtgagtaagttctttgctttatgtgaatccaataaaaaatccaaagaatttt

SEQ ID NO: 1470 - DNA, 128 bp, Homo sapiens
  misc_feature 31, 37, 92: n = A,T,C or G
tgaacataattacatttgtacacaaactaantaccgnatttggaaacctgcttattgctgtacacatgtattccaatgaaatataagcccantacttcaaaatacctacactttgttttttttttttt

SEQ ID NO: 1471 - DNA, 497 bp, Homo sapiens
cagaaatgtacaggatacttaaaatggaataactttttggttgcaaaacagagacatggttctataatgcttcatgtccctccaagatttgagatcaatttagggattgtgaaatttttttttcaaatttcatacaatcatatttcccagtacttttcacaatcattttttacccatctaactctatgttttgtggcttcccggtctcttagaactttgaaaacatgatatacaataatgtttatttattatacatccagattctgaaataactttcctactgatgttcagctcacactatctgtacctttttagaagagaaaagaatcttgaattgtatatatttattttgctttacagaaaaaaatggtttcgtaaataatttgcctattttggttaacatagcacatggagataatcatctgaaagttatagggcactgccactgctgaatcagagcatgcccaatatttgaggtggctctgatttcctggcag

SEQ ID NO: 1472 - DNA, 379 bp, Homo sapiens
aaaaacatcacttctttatttcaaaggaaaaataaaagaccctcccaaccctgtccaaaaaaacccaataataataataacaataataaaaaatcctattagaaaccataaggaagcactgagagtttgagtattacattattcaagtatgctgttcggattttttatttttaggttggtaactatacacatataaaaaaaccttaaaagtgcggccaagggattttgcttaaaattaagtatttagagggctacttaaaaatactgtagtaggactgtgcagtgatcctttgggggatgatgctttcacttttgtatcctcgtcaaggttaaggggcaggttcaaaagtgatcatacttccaggattagcgtaagtgg

SEQ ID NO: 1473 - DNA, 612 bp, Homo sapiens
  misc_feature 535, 550, 562, 610: n = A,T,C or G
caagataaaagatttattcacaccacaaaaagataatcacaacaaaatatacactaacttaaaaaacaaaagattatagtgacataaaatgttatattctctttttaagtgggtaaaagtattttgtttgtttctacataaatttctattcatgagagaataacaaatattaaaatacagtgatagtttgcatttcttctatagaatgaacatagacataaccctgaagcttttagtttacagggagtttccatgaagccacaaactaaactaattatcaaacacattagttatttccagactcaaatagatacacattcaaccaataaactgagaaagaagcatttcatgttctctttcattttgctataaagcattttttcttttgactaaatgcaaagtgagaaattgtattttttctccttttaattgacctcagaagatgcactatctaattcatgagaaatacgaaatttcaggtgtttatcttcttccttacttttggggtctacaaccagcatatcttcatggctgngaaattcatggctgnggaattcacggntgactttggaaagttcctgactatcaatcacatcggaatgctcattgntc

SEQ ID NO: 1474 - DNA, 439 bp, Homo sapiens; identical to SEQ ID NO: 1018

SEQ ID NO: 1475 - DNA, 402 bp, Homo sapiens
aaaaaaaaagctcaattttaagtttgaatataatgtgcagtttatataacatatatattatattatatatactttatacattatataaagtattatccttattgtgaactttattatgcttctgaaatttctccatcatttcaaatttacttcaataaaaatttccctatattttgtgaattgcattttcaaatcagaagtaatgttacaaatttctgtctataataaaaaacaaaatattcacgctttattaataatcctaattagaaaaggatgcaattaagagctggcatagctaacataagcataagaaaggtaaacttttcttgaattaaaaaaaggaaatactttaatgaaaaaaaatcaaggacagaaggaaggagaaaattttctaaacagcag

SEQ ID NO: 1476 - DNA, 221 bp, Homo sapiens
ggcttgctggggagcccatccaggacactgggagcacatagagattcacccatgtttgtcgaacttagagtcattctcatgcttttctttataattcacacatatatgcagagaagatatgttcttgttaacattgtatacaacatagccccaaatatagtaagatctatactagataatcctagatgaaatgttagagatgctatatgatacaactgtgg

SEQ ID NO: 1477 - DNA, 486 bp, Homo sapiens
  misc_feature 464: n = A,T,C or G
aaaataaaaagtcattaacattttaatgtaatactgaataattctctgtggaatttatcttttacatttttttccttttaagcaaaaagagatttacagtttataatggtaaagactctactacttcagaatcaaagccaaatcaatattacttaataattcagggaaaatttagataaaatcactagacaacggtaaactgatattcttatctactcataaaattatttttgaattgcaaacgaaccgctatgcgtggctaatttaggaagaaaaatttttttttttttttttttttgagactgagtctcgctctgtcaccaggctggaatgcagtggcgtgatcttggctcaatgcaacctccacctcccaggttcaagcgattctctggcctcagcctcttgactagctgggactacaggtgtgtgccaccacatccagctaatttttgtatttttagtanagacggggtttcaccatgttgg

SEQ ID NO: 1478 - DNA, 488 bp, Homo sapiens
aaacattacccagcatcattgtttataatcagaaactctggtccttctgtctggtggcacttagagtcttttgtgccataatgcagcagtatggagggaggattttatggagaaatggggatagtcttcatgaccacaaataaataaaggaaaactaagctgcattgtgggttttgaaaaggttattatacttcttaacaattctttttttcagggacttttctagctgtatgactgttacttgaccttctttgaaaagcattcccaaaatgctctattttagatagattaacattaaccaacataattttttttagatcgagtcagcataaatttctaagtcagcctctagtcgtggttcatctctttcacctgcattttatttggtgtttgtctgaagaaaggaaagaggaaagcaaatacgaattgtactatttgtaccaaatctttgggattcattggcaaataatttcagtgtggtgtattat

SEQ ID NO: 1479 - DNA, 113 bp, Homo sapiens; identical to SEQ ID NO: 1295

SEQ ID NO: 1480 - DNA, 460 bp, Homo sapiens
ccacgctctcacggaaccactggcatcagatggtgaagtgactgctacccggttgccatctgttgaacagacttttggatgaagtgtgttggggaagaggataaggttatatctaggacaactctttgagttggtccttcatataagaatcgtgacggtaagagaataaacacttgtactgggatcagaatacatgatggatgaaattctttacatgttttagcagaatgaatttgtttaatataataaagtttgctacttatctgtatgtaggttgctaaaaaggattttcttaactcagattttaagccaaataaccatttaacactagtatttgttaaatggggtatttttctgtatttgtatgtttcactataataagggaattaaggataatgtgcattgagaatattttgaaaaataattggctcaaattttatttcttggtcttttgctgttt

SEQ ID NO: 1481 - DNA, 261 bp, Homo sapiens
  misc_feature 113: n = A,T,C or G
gtgctgggacacagagttgaattagaccactgtcccttggccttgaagagtttatttactcattcactcagcagcattcaccaagccctactgtgtgcattggctgggcaagnggtggtgttgggggtagagtgagcgttgctggcagggggagccggggtggatgtgaagcagcccacaggtcaggcctccatatctggaaagagcaggaacccggaaaagatgctgttggcaccctccatgcccagtagtgagttcttg

SEQ ID NO: 1482 - DNA, 115 bp, Homo sapiens
tcgagcggcccgccccgggcaggtcaagcttttttttttttttttttttttttgttttttttttttttttttttttttttttttttttttttttttttttttttttttttttttt

SEQ ID NO: 1483 - DNA, 453 bp, Homo sapiens
ccaacagaatccttcttgatagtttgcaggcaaaacaaatgtaatgttgcagatccgcaggcagaagctctgcccttctgtatcctatgtatgcagtgtgctttttcttgccagcttgggccattcttgcttagacagtcagcatttgtctcctcctttaactgagtcatcatcttagtccaactaatgcagtcgatacaatgcgtagatagaagaagccccacgggagccaggatgggactggtcgtgtttgtgcttttctccaagtcagcacccaaaggtcaatgcacagagaccccgggtgggtgagcgctggcttctcaaacggccgaagttgcctcttttaggaatctctttggaattgggagcacgatgactctgagtttgagctattaaagtacttcttaccgaaaaaaaaaaaaaaaaaaaaaaaagcttgtacttttgtacaag

SEQ ID NO: 1484 - DNA, 512 bp, Homo sapiens
gagatgtatcttttgctctctcttgctctcttatttgtaccggtttttgtatataaaattcatgtttccaatctctctctccctgatcggtgacagtcactagcttatcttgaacagatatttaattttgctaacactcagctctgccctccccgatcccctggctccccagcacacattcctttgaaataaggtttcaatatacatctacatactatatatatatttggcaacttgtatttgtgtgtatatatatatatatatgtttatgtatatatgtgattctgataaaatagacattgctattctgttttttatatgtaaaaacaaaacaagaaaaaatagagaattctacatactaaatctctctccttttttaattttaatatttgttatcatttatttattggtgctattgtttatccgtaataattgtggggaaaagatattaacatcacgtctttgtctctagtgcagtttttcgagatattccgtagtacatatttattttt

SEQ ID NO: 1485 - DNA, 379 bp, Homo sapiens
ccacttacgctaatcctggaagtatgatcacttttgaacctgccccttaaccttgacgaggatacaaaagtgaaagcatcatcccccaaaggatcactgcacagtcctactacagtatttttaagtagccctctaaatacttaattttaagcaaaatcccttggccgcacttttaaggtttttttatatgtgtatagttaccaacctaaaaataaaaaatccgaacagcatacttgaataatgtaatactcaaactctcagtgcttccttatggtttctaataggattttttattattgttattattattattgggtttttttggacagggttgggagggtcttttatttttcctttgaaataaagaagtgatgttttt

SEQ ID NO: 1486 - DNA, 204 bp, Homo sapiens
cagttcctctttgccttatatttgtggtacgcccggccagccttcaagatgggtttgtcaattcggccacctccagccaccacaccaaccacagctctgttggctgaggagataaccttcttggagccggagggcagcttcacacgggtcttcttggtctcagggttgtgggagataacggtggcatagttccctgatgcccgg

SEQ ID NO: 1487 - DNA, 428 bp, Homo sapiens
aaatcacagtgttttattctttttattggattagagatgtatagactggttacactcttttagtaattaacattaaattacactatgcacatttaacttatcaaagtcaaattaaacactatcttacaccctcttcccaacaactggagggtcttagaacatttctgtcccttctaatttacatgctattgttgtctagtattttagttgacactattcttttatatatacatatgtattcatatttataattttatttgcttgccattccatcttatatctaagaccatcactcggctcattttcctttatttatttatttttttaagatggagttttgctctttttgcccaggctggagtgcaatggcgtgatctcggctcactgcatcttctgcctcccaggttcaagggattctcctgcctcag

SEQ ID NO: 1488 - DNA, 405 bp, Homo sapiens
aaaattcagcaaaatcatacgccatctaccgtgatgactgccaactccatggcagaccctttctgggattcaaaaaccaattcatcagatcgctgcctctgagggatgtacagattggctggggagctgagtgctacaataaaggaggaagtaccggggaacagtgcagggcaaaggcaggaaagagatctgagctgcctggagatcatctggggtgcggagtacaaagctttgcaagggtgtggttttggaatgacgctaaactgaaggtggagagaacagataaaaaggttggaagttgcacactatacactgttaagaagttgagcttttatcttagaggcagcagaaggtttggagccaaggaatgaaatgatgaggcgtccttcaggtaatgaacttcag

SEQ ID NO: 1489 - DNA, 262 bp, Homo sapiens
catgggtgtgcttggcccacagggcctggtggtgatggacctccccgctccctcaagctctggatggctgcagtgttgtactagactttgttcaggctgttctcatctcagtattgccccttcctttcactttcacacttcatctcattcctgttgtcactttccccgaaacgaataaagtctccccagctcctgctgtgtaggctgggcagaaaccacaaaaaaaaaaaaaaaaaaaaaaaaaaaaaaaaaaaaaaaaaaa

SEQ ID NO: 1490 - DNA, 450 bp, Homo sapiens
  misc_feature 27, 106, 124, 156, 177, 192, 194, 199, 335, 414, 424: n = A,T,C or G
ctttttttttttttttttttttttcanatgtgtaaaaaggctttatttgcaggggagcaggaatttaatcaaaaaggccaaatcccatgtcatcatctgactcttnaaactcctccttcttctnatctttcttctcctctgctgcagcaggggcanaaccagcagcaggggctgcanagcctggggcagcananacggntacagccccaccagcaggtacactggcaagcttgccaataccctgggcaatgacgtcttcaatgttttttccattcagctcactgataaccttgttgagccggtcgtcgtccgcctcgatacccacgctgtccaanatcttcttgatgtccttggcgctgggggaggagttgccccctagggcagccagcaggtaggaggcgacgtagcgcatcncggaggcgtntgcggcggaggcggcggaaaagtctc

SEQ ID NO: 1491 - DNA, 613 bp, Homo sapiens
agcagcactggtggtgcctcagccatggcctggaccgttctcctcctcggcctcctctctcactgcacaggctctgtgacctcctatgtactggttcagacaccctcggtgtcagtggccccaggaaagacggccacaattacctgtgggggaaacaacattggaagtaaaagtgtgaactggtaccttcagaagccaggccaggcccctgtgctggtcgtctatgatgataccgaccggacctcggggagtcctgagcgattctctggctccaactctgggaacacggccaccctgaccatcagcagggtcgaagccggggatgaggccgactattactgtcaggtgtgggatagcagtagtgatcaaggggtgttcggcggagggaccaagctgaccgtcctcggtcagcccaaggctgccccctcggtcactctgttcccgccctcctctgaggagcttcaagccaacaaggccacactggtgtgtctcataagtgacttctacccgggagccgtgacagtggcctggaaggcagatagcagccccgtcaaggcgggagtggagaccaccacaccctccaaacaaagcaacaacaagtacgcggccagca

SEQ ID NO: 1492 - DNA, 558 bp, Homo sapiens
aaaaattataaccgattctaagtatatactttaagaaattcaggtttgactgtatctacttcataaatttatcattatctttttataactattagaaccagagttagaaagaagcagtttggctaatataaaaattatgtggattctgttagagtagttcagcttccttaaaataagcatatatcaactaacaaactaaatataaaagctaaacaagtgaaactgaagcagatttattgtaagatttggaagagtgcaggatgtttatcatagcacattattaatatttattattcttcctatgtagataagtaatgtcctagatttataccatagaaaaacaggtagagacgtttagctgtgagtgtacaagtataaatcaattaagtgccagattttgatcatcaccagttgctcattcaagtcctatgttgcaaagttactcttacccttttttacattacttgataaaggcaatgtttaattatgtatttcctgttaactagctggtagagttcatacctaaagtcagtaaataatgttaagaattttttccag

SEQ ID NO: 1493 - DNA, 349 bp, Homo sapiens
aaaaataaatatgtactacggaatatctcgaaaaactgcactagagacaaagacgtgatgttaatatcttttccccacaattattacggataaacagtagcaccaataaataaatgataacaaatattaaaattaaaaaaggagagagatttagtatgtagaattctctattttttcttgttttgtttttacatataaaaaacagaatagcaatgtctattttatcagaatcacatatatacataaacatatatatatatatacacacaaatacaagttgccaaatatatatatagtatgtagatgtatattgaaaccttatttcaaaggaatgtgtgctggggagcca

SEQ ID NO: 1494 - DNA, 150 bp, Homo sapiens
cggccgaggtaaatacaagtggatttttagagtttattaagcaggggagtggaggggagatgtggcacaaatagaagtatgtaacattcaaacaacagcatctaggatttttgaaaaaactttcggttacagttacacaaagggtcactt

SEQ ID NO: 1495 - DNA, 115 bp, Homo sapiens
ctgattctgaaggccatctccagttacttcgtgtctacaatgtcctcttccatcaaaacggtgtacttcgtgctttttgacagcgagagtataggcatctatgtgcaggaaatgg

SEQ ID NO: 1496 - DNA, 616 bp, Homo sapiens
gcgtgacgtacgtcagcaatatgaaagtgtggctgccaagaacctgcaggaggcagaagaatggtacaaatccaagtttgctgacctctctgaggctgccaaccggaacaatgacgccctgcgccaggcaaagcaggagtccactgagtaccggagacaggtgcagtccctcacctgtgaagtggatgcccttaaaggaaccaatgagtccctggaacgccagatgcgtgaaatggaagagaactttgccgttgaagctgctaactaccaagacactattggccgcctgcaggatgagattcagaatatgaaggaggaaatggctcgtcaccttcgtgaataccaagacctgctcaatgttaagatggcccttgacattgagattgccacctacaggaagctgctggaaggcgaggagagcaggatttctctgcctcttccaaacttttcctccctgaacctgagggaaactaatctggattcactccctctggttgatacccactcaaaaaggacacttctgattaagacggttgaaactagagatggacaggttatcaacgaaacttctcagcatcacgatgaccttgaataaaaattgcacacactcagtgca

SEQ ID NO: 1497 - DNA, 329 bp, Homo sapiens
  misc_feature 41, 57, 95, 107, 116, 198, 315: n = A,T,C or G
acaagcttttttttttttttttttttttttttttttttacnaatacactgtagttanaactcaactttattgttacaacgaatttttatttacanaatataaatctnttcaaaaanatacattccttcatttaatcaatggtaaaaagccttattaacagaaataaagcctaaacatcacttatatttgaactgaaanacaaacagcttcattaaaaatttatgaacacatagtgaaaatgtatttttacttaaccagttacatgaatgaggctgtttttaattttcttcactgccaacctcattttatccacanaacaaattttattt

SEQ ID NO: 1498 - DNA, 513 bp, Homo sapiens
aaatggtattggagggtgagtaaaaccttgaatgtgaaaacttaagctgaaaaattgtaaaaacatttcacgcctaccatgaatagatctgtttctttctgtccacaatgatttgtgtcatagacataattgatcaatttgcaattgttttcttgacaggtcgttccaggggtagaggaggcatgaaggatgaccgtcgggacagatactctgcgggcaaaaggggtggatttaatacctttagagacagggaaaattatgacagaggttactctagcctgcttaaaagagattttggggcaaaaactcagaatggtgtttacagtgctgcaaattacaccaatgggagctttggaagtaattttgtgtctgctggtatacagaccagttttaggactggtaatccaacagggacttaccagaatggttatgatagcactcagcaatacggaagtaatgttccaaatatgcacaatggtatgaaccaacaggcatatgcatatcctgctactg

SEQ ID NO: 1499 - DNA, 214 bp, Homo sapiens
  misc_feature 11, 12: n = A,T,C or G
tggcagggaanngaaagaacttgcatgttggtgaaggaagaagtggggtggaagaagtggggtgggacgacagtgaaatctagagtaaaaccaagctggcccaaggtgtcctgcaggctgtaatgcagtttaatcagagtgccatttttttttttgttcaaatgattttaattattggaatgcacaatttttttaatatgcaaataaaaagttt

SEQ ID NO: 1500 - DNA, 343 bp, Homo sapiens
aaaacagagaatttcatattgattaacacctactactaaacagaatgatgcattaattaaatgccttgtcctaactgttataagctctgttagaaaaataaacatctcaccacaaactacagtgtcggctctttaataaatacataaaacagaagttagtagtcaatcagagttatatgaacaggttcatagtatattatgtgaaagtatcatattctccaatattctgtatcatttaagacaatttaagttacgtataattcaaagccagaaataataagaaatatgttcagtgataatttgcttctttcttagagctattttatattcaaatatttaattt

SEQ ID NO: 1501 - DNA, 151 bp, Homo sapiens
cctcctgggcaaggggcaggcccagagcctgcgtttcttggcacagacacagagagaaatggaataaattatagttctgacactcagggacaatgtagaaattatgatgcaaaattaaacattagcaaacaaagggtataaaaaccctcag

SEQ ID NO: 1502 - DNA, 500 bp, Homo sapiens
ctggctatcccccattctttgcagaccaaccaattcagatttatgaaaagattgtttctggaaagcagaacttttgatatgaacaaaacaaaactttgagaaaaattaacagacaaggcagtgatttatttttgaagaatttgagaagtgtagactctcaagaggactaaaggtcatatgaagaatgatgagagaaccaaaatacattaaaatcacaaatggaagaagaatattttactaatacaaaaactaagaatgtaaatgttataataattgtttcaaatcatttaattgacagtaattataaagttcttgaatctttactatattacttttatttatacttcatataagaaatccagttttctaacaaggatactgtcataactaaatttacatttattaagaaaaactgctttagttaaaattaatgtgtcttcatttttatgcattggcctcgatttgccaatcattctctattggttaaaatttatattcag

SEQ ID NO: 1503 - DNA, 257 bp, Homo sapiens
aaatagcttttttctctgatacagaaaagttgaattttacatggctggagctagaatttgatatgtgaatagttgtgtttgaagcacagtgatcaagttatttttaatttggttttcacattggaaacaagtcagtcattcagatatgattcaaatgtctataaaccgaactgatgtaagtaaatggtctctcacttgttttatttaacctctaaattctttcattttaggggtagcatttgtgttgaagaggtttt

SEQ ID NO: 1504 - DNA, 223 bp, Homo sapiens
ctgtgttattctttgcgtgtagctatggaagttgcataattattattattattattataacaagtgtgtcttacgtgccaccacggcgttgtacctgtaggactctcattcgggatgattggaatagcttctggaatttgttcaagttttgggtatgtttaatctgttatgtactagtgttctgtttgttattgttttgttaattacaccataatgctaattt

SEQ ID NO: 1505 - DNA, 285 bp, Homo sapiens
ccttccagggccacggcgcgggcaacctggcgggtctgaaggggcgtctcgattacctgagctctctgaaggtgaagggccttgtgctgggtccaattcacaagaaccagaaggatgatgtcgctcagactgacttgctgcagatcgaccccaattttggctccaaggaagattttgacagtctcttgcaatcggctaaaaaaaagagcatccgtgtcattctggaccttactcccaactaccggggtgagaactcgtggttctccactcaggttgacactgtgg

SEQ ID NO: 1506 - DNA, 287 bp, Homo sapiens
ctgtggtggtgccttctggagaggaacagatacatgtgccatgtgcagcatgaggggttgcccgagcccctcaccctgagatgggagcagtcttctcagcccaccatccccatcgtgggcatcgttactggcctggttctccttggagctgtagtcactggagctgtggtttctgctgtgatgtgcaggaagaagaactcagatagagtgagctactctgaagctgcaagcagcgaccatgcgcagggttctgatgtgtctctcacggcttgtaaagtgtgagacag

SEQ ID NO: 1507 - DNA, 135 bp, Homo sapiens
cctgcgacgaactgggaatcatcctcgctcatacgaaccttcggctcttccaccactgattttaccacacactgttttttggcttgcttatgtgtaggtgaacagtcacgcctgaaactttgaggataacttttt

SEQ ID NO: 1508 - DNA, 258 bp, Homo sapiens
ccggcgtggtggaagaggggacaggtccctcacccacccacaatcctattctcgggctgagaaccctgcgtggggacagggctcgcctcaggaatgggctgtttttggcctaaccctcagaaacactggggctggcacaaactcttggtttcttcaacaggagaattttactgtgtttcttttggttccattgtttggagacattcctgggcacagtttggtccgttagaattaaaagttgaattttttttttttttt

SEQ ID NO: 1509 - DNA, 232 bp, Homo sapiens
ccagcgacagcctggcctgggaatggactggcagctcatcactaaaatgactcctttcatggaatccactgctatgcagccacactgaccacagagcaactgaataggtgagcattggattgttgatgacaactcttcagcagaacaattgtgtgtttgaagggactgttttataatgaaataactgttatttcctggagctaattgttgaatgacagtttgtcaactgttt

SEQ ID NO: 1510 - DNA, 209 bp, Homo sapiens
  misc_feature 3, 4: n = A,T,C or G
ttnngaaaaaatataatttttttacaatattttcaacttaaacactattcacactgaacacgtatggcagcttaacctacccaaatatgaagtttaagaagccaaaactgttctagctttgttaaaagttgtgctgcagactctcgtgatggttaacaaagcaaggaaaagcaccactcaaatcataatgttacagtatctttgttcag

SEQ ID NO: 1511 - DNA, 78 bp, Homo sapiens
ccactttacactacaggtgtaatgcattttgtctgtttcacattgtgtgcatgtcctgccccaacaactccattcttt

SEQ ID NO: 1512 - DNA, 302 bp, Homo sapiens
  misc_feature 90: n = A,T,C or G
gggccctgaggacctggccccgggcaagggactctccaggctcctcctccccctggcaggcccagcaacatgtgccccagatgtggaagngcctccctctctgccagtgtttgggtgggtgtcatgggtgtccccacccactcctcagtgtttgtggagtcgaggagccaaccccagcctcctgccaggatcacctcggcggtcacactccagccaaatagtgttctcggggtggtggctgggcagcgcctatgtttctctggagattcctgcaacctcaagagacttcccaggcgctcagg

SEQ ID NO: 1513 - DNA, 276 bp, Homo sapiens
ttttttttttttcttttttttttttatccctcaaaaactgtttattatacaagtgagttttgagtcacgatgggcttatcggtaggatttctggtagcgagcgcgggcaccagggcctccaaactttttggactcgcagcgacgagggtcagctaccagcagggtccggtcatactggatgaggatgtctttgatctccttcttggaagcctcatccacatatttctggtaataggccaccagggctttggagatggactgacggatagcataaat

SEQ ID NO: 1514 - DNA, 511 bp, Homo sapiens
  misc_feature 424: n = A,T,C or G
aaaaactattttaatacaagattaatagcaattttctatccaaatcagaaatgaaaaatcttaacccaaataatattcatttgacagtcacataaaattttagatttgattggtgcacacatttatcctgcatatatattatgtatatgcacagagagacctcactattatgccattgttaggggtctttttttggaagtacctcattacaaggcaatgtcaaaggttccagtaactactcaactttgaatgaagttcaaaatgtccccatgctaagctgagtctgtgccatagcaaaccatgatatagcaagtctccagaatgtgtacaaatcaatactctgtttgtataagttggtctaaaactaaacactggctaatgtctccaacaaggaggaacacattacaaatttataagttatggnttcctttactcttctgttggcaaagctacattgtgtttttaaataaaaatgttccatttaaaattttggcatatggcattttctaac

SEQ ID NO: 1515 - DNA, 349 bp, Homo sapiens
ggccgtttcagcatcaggcaagtggctggatggtattcgaaaatggtgttacaatgctgcaggattcaataaactggggttaatgcgagatgatacaatatacgaggatgaagatgtaaaagaagccataagaagacttcctgagaacctttataatgacaggatgtttcgcattaagagggcactggacctgaacttgaagcatcagatcttgcctaaagagcagtggaccaaatatgaagaggaaaatttctaccttgaaccgtatctgaaagaggttattcgggaaagaaaagaaagagaagaatgggcaaagaagtaatcatgtagttgaagtctgtggatgcag

SEQ ID NO: 1516 - DNA, 480 bp, Homo sapiens
ctgtcctctgttactcagatacagttccaaaactaagcgattatataagcacatccatattttagggctactctaagttaaaaaccttttctcttgtttcagagttatttacatcaaattaagacatttacaaattgttcatagtatacaatagcccaaatatgattttcacctatgctgtgtaaagaagttaagcattcgtaagtttgtctaataaattcagtgcacttttttccataacacgagctattctaaatgttttacatttctttcagtgcatatttccaaattcattaaacagaatgaaatcaatgttattaaatggctatatcataatattcaagcatattatggaatctataccacagtgggattcacgtcaatactataattcactctagaaaaacatcacaggcacacacaaaataaagaacaaaatttgattttttttttataaatgtaaagtatactatctacttt

SEQ ID NO: 1517 - DNA, 293 bp, Homo sapiens; identical to SEQ ID NO: 1372

SEQ ID NO: 1518 - DNA, 334 bp, Homo sapiens
cgcgccgccacaatggtgcgcatgaatgtcctggcagatgctctcaagagtatcaacaatgccgaaaagggaggcaaacgccaggtgcttattaggccgtgctccaaagtcatcgtccggtttctcactgtgatgatgaagcatggttacattggcgaatttgaaatcattgatgaccacagagctgggaaaattgttgtgaacctcacaggcaggctaaacaagtgtggggtgatcagccccagatttgacgtgcaactcaaagacctggaaaaatggcagaataatctgcttccatcccgccagtttggtttcattgtactgacaacctcag

SEQ ID NO: 1519 - DNA, 362 bp, Homo sapiens
gccaagttcattggagctggggctgccacagttggggtggctggttctggggctgggattggaactgtgtttgggagcctcatcattggttatgccaggaacccttctctgaagcaacagctcttctcctacgccattctgggctttgccctctcggaggccatggggctcttttgtctgatggtagcctttctcatcctctttgccatgtgaaggagccgtctccacctcccatagttctcccgcgtctggttggccccgtgtgttccttttcctatacctccccaggcagcctggggaacgtggttggctcagggtttgacagagaaaagacaaataaatactgtattaataagatgttt

SEQ ID NO: 1520 - DNA, 95 bp, Homo sapiens
  misc_feature 83, 84: n = A,T,C or G
aggagattggaaaacttgaagataaagtggaatgtgctaataatgccctgaaagcagattgggagagatggaaacaaaatatnncaaatgatatt

SEQ ID NO: 1521 - DNA, 135 bp, Homo sapiens
gtcattattcagaatgtagtctggtctttaggaagtattaataagaaaatttgcacataacttagttgattcagaaaggacttgtatgctgtttttctcccaaatgaagactctttttgacactaaacacttttt

SEQ ID NO: 1522 - DNA, 215 bp, Homo sapiens
aaatattgctgtattagacaattttaactgaagtaggttgtagaggctagaaacctgattaatagagcagtattagacaattctaactgaagtaggttgcagaggctagaagaaacctgattaatagagttagcttacaaagataaattttatgcagaaaagtattccaggtagataaaagagtagtgttattactctcaggtttacattaacag

SEQ ID NO: 1523 - DNA, 543 bp, Homo sapiens
ccaatatctgataggaagatgtaatataaagaagggggatcaaatcctgcccttaaggtagacagaatctgtcaaggctttagagtgtaccatcaaagagttaacagccaacagaacaaaatttagcatcatcacaattttggaagtttttcaacagccctatgatttataaactgtcaatcactatttttacatataaatcatttccagtggtagtaaatgtgctaatattctcgatatatgtgaaaaatatcacttaaaattttttcctggaagaagcacttaataatttgtaaatcagaaacaaattatatgtactttctaagtagattagtgtatttctcatacatagatgatggcatagatttgcttttttagtaaattgtcagatatcagactctaacttatggaacaaatgaatataagtaaactcactcccatttgattgttttgtaaatgaaaaatgtaatattaaatttgtgagatgaatgtgtatgtagtaaatacattaataaaaatgtgtagatcaaaaaaaaaaaaaaa

SEQ ID NO: 1524 - DNA, 444 bp, Homo sapiens
aaaagcacaaatagaatataaggcaaacagtacaaagctgtgaaaagggtagcagagaactgaggcattcatttataaacaacatcacagaatataaacgaagatcatattttgtggatgtttgcattcacactgagctttactctttttttcctattaaggtctttcatttacaggtaatgatcaacaagacaaaaatatgtaaatgactaattataaatatgaaaaaattcagtgacattttctataactatttccccatgtcactgactgctaagttttcacttccttactaggctgagtttcaaatgaggtatccgcactcatctaagcttttcactactgcaaaacaagcttgactattgggaacattaacatttatcttcccaagaatcactcatcattctttggagaagaacctacttgttaaattaacagcattta

SEQ ID NO: 1525 - DNA, 576 bp, Homo sapiens
  misc_feature 564: n = A,T,C or G
gtggaagctgctgggtgaatgacttccagaggagattggaaaacttgaagataaagtggaatgtgctaataatgccctgaaagcagattgggagagatggaaacaaaatatgcaaaatgatatcaagttagcatttacagatatggctgaggagaatatccattattatgaacagtgccttgctacgtgggaatcattccttacatcacagaccaaccttcacttggaagaagcctctgaagataaaccttaatcccattgaggacttctgtttgatctttgggagacagcatttattaaccaaagttattctttctggatctgccgtgtccttataaagtggatgaaaaatgttttgtacccatctggaaaaccaacaacttgaaatctcaggtattccaggtcactgacatgaatttgaagatatatctatctgtatggatatatatctatatgtatatagatatataaatacagagagatatctggcttggttttaattatgttcttaaatttgtgtgccaataattgcatatagattttttttcttaaatatttgactgnggaacatgccat

SEQ ID NO: 1526 - DNA, 297 bp, Homo sapiens
  misc_feature 194: n = A,T,C or G
aaatgactgtgctgcccctttcacatcaaagaactactgacaacgaaggccgcgcctgcctttcccatctgcctatctatctggctggcagggaaggaaagaacttgcatgttggtgaaggaagaagtggggtggaagaagtggggtgggacgacagtgaaatctagagtaaaaccaagctggcccaaggtgtnctgcaggctgtaatgcagtttaatcagagtgccattttttttttgttcaaatgattttaattattggaatgcacaatttttttaatatgcaaataaaaagttt

SEQ ID NO: 1527 - DNA, 556 bp, Homo sapiens
ctggaatatcactatttttgattatatccatgtgtcttctcttcctatggaaaaaatatcaaccctacaaagttataaaacagaaactagaaggcaggccagaaacagaatacaggaaagctcaaacattttcaggccatgaagatgctctggatgacttcggaatatatgaatttgttgcttttccagatgtttctggtgtttccaggatcccaagcaggtctgttccagcctctgattgtgtatcggggcaagatttgcacagtacagtgtatgaagttattcagcacatccctgcccagcagcaagaccatccagagtgaactttcatgggctaaacagtacattcgagtgaaattctgaagaaacattttaaggaaaaacagtggaaaagtatattaatctggaatcagtgaagaaaccaagaccaacacctcttactcattattcctttacatgcagaatagaggcatttatgcaaattgaactgcaggtttttcagtatatacacaatgtcttgtgcaacagaaaaacatgttggggaaatattcctcag

SEQ ID NO: 1528 - DNA, 276 bp, Homo sapiens
ctcgtactatgaaatttttaagccttttatttttctaactatattactgtaggactggatattaggtgtcatataggaaacacaaaagttattgctgtttgctaaagcaaaatagcagaaaattttgtatatgaaaaactgttgaaggaccatagagaaatgtgtactactgacggggcttttactaggcttcctgcgtgtgtaaaagtcgaggtattgctggcattcagggtgacatgatggtactaaatgttttccattaaagtcttctatttt

SEQ ID NO: 1529 - DNA, 475 bp, Homo sapiens
aaattgtagcttttagagacctatgatcctcatggaacttaattttttattaaatattcaggtaacagttctgaattcatgtgataatggtggcattatatatgattaaacacttcagaactttctaatgttatcaggagtattttgagggagatatgattatattgtattttctcagataagaaaaatgttttttaacaatattattttaatctgttttaagcatctcttagatttacattataactacataaagcagtgaagcaaaggcaaattaagataaagctagaaagtctgaacattttatttcaaaatcatacgaatcggggtcagttaagcctcagtattcttagcttttgttgattttggcactatctttatattattaaatatatttgttgtttggatatttcatataaagatggctataattacatatttcattcccaatttgtgtgtgttggggggtactttt

SEQ ID NO: 1530 - DNA, 518 bp, Homo sapiens
ccacacagactcaccaagccacagacttgtcttccacaagcacgttcttaccttagccacgaagtgaccaagccacacgtactaaaggttgaactcaaagatatgtacagggtattaaacaaataccaaggggaacagttaacttcaatacaaggtcaaaatcagcaacaagttctacaatccagtgctgatatcagatacaagcttcaaggacaatttcttttcgaaggcttattccagtttcgtgaggctagcatgaggtgtgtgcatttgccaggggcaaatttctattctcaattaacccatgcagcaaatgctacgcatctgctgagtccgtttagaagcatttgcggtggacgatggaggggcccgactcgtcgtactcctgcttgctaatccacatctgctggaaggtggacagtgaggccaggatggagccaccgatccacaccgagtacttgcgctctgggggtgcgatgatcttgatcttcatggtgctgggcgccagggcggtgatc

SEQ ID NO: 1531 - DNA, 529 bp, Homo sapiens
  misc_feature 90, 113, 274, 278, 286, 337, 361, 428, 444: n = A,T,C or G
tttttttttttttttttgaaaaagtcatggaggccatggggttggcttgaaaccagctttggggggttcgattccttcctttttgtctanattttatgtatacgggttcttcnaatgtgtggtagggtggggggcatccatatagtcactccaggtttatggagggttcttctactattaggacttttcgcttcgaagcgaaggcttctcaaatcatgaaaattattaatattactgctgttagagaaatgaatgagcctacagatgataggangttncatgtggngtatgcatcggggtagtccgagtaacgtcggggcattccggataggccganaaagtgttgtgggaagaaagttanatttacgccgatgaatatgatagtgaaatggattttggcgtaggtttggtctagggtgtagcctganaataggggaaatcagngaatgaagcctcctatgatggcaaatacagctcctattgataggacatagtggaagtgagctacaaccgtagtacgtgtcgtgac

SEQ ID NO: 1532 - DNA, 360 bp, Homo sapiens
ctgaatttctgaaagtgtttccttacaatggtggtacctggctcagggatgggcaggggtagccaaaccctccccgtgctgcccagttcgctgagggtgggagtaggaacaaaagtttaaggctgaggccactgccatgccctggatgtaacaaccaggaaaatcatgttaatcaaggaaacaaaaattcctctagactctgcaatactgcactcttaacaaaaatcaaatgaaaacaagacgtgtctgccacaggtctcagggtaacagatgccctgtccactgagagcggcagttctgcagtcagagttctttgatcagccctggacccatttatcacatgggggaggaagggagggt

SEQ ID NO: 1533 - DNA, 251 bp, Homo sapiens; identical to SEQ ID NO: 507

SEQ ID NO: 1534 - DNA, 359 bp, Homo sapiens
cctaagagtagcaggaactctaagaccacagagttttttataaatgtataaatgtatcaagccaaatgtgcagatgctaactggacattctggggaactgggcaccaggagtgccttcatacactgtaccccagctctcttctaaaagagaagtgggtgggcacactgaactgtttggtggccccaaccacaggaagctgcaattctctggcttagggtgatacttttgccctccttgtgcccctctcagctttccatccccagctaggaagaaagaatggcactcttgggcttggcccagaattagagttattagagcaagagagagcttaggaagcatgagggcaactatagtgagg

SEQ ID NO: 1535 - DNA, 106 bp, Homo sapiens
ataggaataagctctagttcttaacaaccgacactcctacaagatttagaaaaaagtttacaacataatctagtttacagaaaaatcttgtgctagaatacttttt

SEQ ID NO: 1536 - DNA, 383 bp, Homo sapiens; identical to SEQ ID NO: 370

SEQ ID NO: 1537 - DNA, 359 bp, Homo sapiens
aaaagaggtgcctgcatgtcactattacccccctccccaaatgagaaaaggattttgtttccggaaactggatcagcttctcctcagttaaagaggaaacgggaagtgggcggctggccttctgaccaggcacccgtttgaaccaggatgctcagggcggcctaggcttggctttgtgaagtgtgtgctgctacgcgtcttgtttttggcagtttggtgtctctgagggaggggaggagagtggcaaccggccactggttaatggaagaggatgcgatgcggagatgcttgcttccttcctttggtccaccgccaccccgcctttggagagggcacccacgtaatagacctcatttgtc

SEQ ID NO: 1538 - DNA, 423 bp, Homo sapiens
  misc_feature 211, 213, 220, 226, 227, 232, 239, 247: n = A,T,C or G
gattttttcaggagctggaagtcttagaaaagccttgtaaatgcctatattgtgggcttttaacgtatttaagggaccacttaagacgagattagatgggctcttctggatttgttcctcatttgtcacaggtgtcttgtgattgaaaatcatgagcgaagtgaaattgcattgaatttcaagggaatttagtatgtaaatcgtgccttananacacatntgttgnnttttntgtgttnggtcgatnttaataatggcaaaatttttgcctatctagtatcttcaaattgtagtctttgtaacaaccaaataaccttttgtggtcactgtaaaattaatatttggtagacagaatccatgtacctttgctaaggttagaatgaataatttattgtatttttaatttgaatgtttgtgcttttt

SEQ ID NO: 1539 - DNA, 485 bp, Homo sapiens
  misc_feature 9, 123, 125, 131, 137: n = A,T,C or G
aaaatgatntgcaaaaatatttagaaatccagttgggaaatgtgtttttgcatatgtcaccagatacacattaggcagtactacaaatgttaattcttaaacaatactgtggtgatggcaatnantaattnatttcnttgtcctgtaacttatcattcttgtcttttgtaatgtcttacacagtattaacataactgtaccttttttttgttcttggtatccatacattttaagatggaaaatcagttcatagttgatatgatattgtatatgggcaaaatgtccgttaaactaaaattcagtaaaaaaggtaatataaactggcttgatttataaaagatgttttgtttggcagttatcagtcattataagcaattatcttcaaagacaaaaaaactggactaatttgttgccattctttatgggatgtttacaataaaattccaagttgtttggaatcaattgcactcttaaaaaaaaaaaag

SEQ ID NO: 1540 - DNA, 84 bp, Homo sapiens
  misc_feature 35, 37: n = A,T,C or G
ctttattttcatctctcatcttttgtcctccttancncaatgtaaaaaagaatagtaatatcagaacaggaaggaggaatggct

SEQ ID NO: 1541 - DNA, 466 bp, Homo sapiens; identical to SEQ ID NO: 842

SEQ ID NO: 1542 - DNA, 509 bp, Homo sapiens
  misc_feature 9: n = A,T,C or G
ctgggacanatatgggaagcaagggaaaagaacacctcacttggtttagggcttcccaaaagggtggcattgaagccaagacccaattacctccatgcctgggagccatgcccatgctgacgttgttgacagccatcctgtctcctcctttctgctttcaccaggacgtaacttgggttcccaaaaggccactgtcatgctttctgtttcctatatgacctagcactgggactattcaccaagttttggtcttctgacatctcctctgtgcacttccattttattcccacccaccagtgagggcactcaggccatgtttcctcagggctggctgcaccagggtttccctcaaagtgttccttctgatagtgaccagacagaactccaggattgagcccaggctggagttgcctgaatggaaaaataaatatgtactacggaatatctcgaaaaactgcactagagacaaagacgtgatgttaatatcttttccccacaattattacgga

SEQ ID NO: 1543 - DNA, 453 bp, Homo sapiens; identical to SEQ ID NO: 1099

SEQ ID NO: 1544 - DNA, 251 bp, Homo sapiens
cccgggggcccttgaggaaggatccagagtcagaagatgaggttccagacgtcaaactggactgggaagatgtgaagactgcacagggaatgaagcgctctgtgtggtctaatttgaagagagccgccacgtaacctctctggccttgtgcagccagttcctgtgctgccctgcacctaggagagactcagcccctcacagcttgggatgttaccttgccttttgtttgttttgagggaagtttaatcttt

SEQ ID NO: 1545 - DNA, 378 bp, Homo sapiens
aaacaaacttccagagaaaactggtctctatatatttaagtaacaaatttgacaaaatacatatttatacatatatagatctctaatataaatattaaatttgaaaaaatcaaatgtgaagcagaaactgctatacaagtatattgtataatatttattttatacattaaagtatttggttgaatatacttcaattaggtttctaaaaaacaccattatctgcttcttagtaattgcgacattcttgaaaagcatgtgaaacgggtataaacttcaactctgtgcttaattcagaattcctgtttgttctcctcaaacttttatcttcctaaagcatcttgccagagactacaaaggaaaggaacatttacagagcac

SEQ ID NO: 1546 - DNA, 369 bp, Homo sapiens
cggaaccatggaagccccagcgcagcttctcttcctcctgctactctggctcccagatattcctggagaaataataatgacgcagtctccagccaccctgtctgtgtctcccggggaacaagccaccctctcctgcagggccagtcagagtgttgccagcgacttagcctggtaccagcagaaacctggcctggctcccaggctcctcatctttggtgcatccaccagggccgcaactaccccagccaggttcagtggcagtgggtctgggacagagttcactctcaccatcagcagcctgcagtctgaagattttgcaatttattactgtcagcagtatactcactcgcctccggtgtacacttttgg

SEQ ID NO: 1547 - DNA, 355 bp, Homo sapiens
ttggaggttagacacagcaagctcccaacccggacgcgaaggcacacgggagagtaaacacagcacccacgagcaacagggcagggctttttttttgggcagtgggggggtggttgttttctttttttccaccatcaagggcatttctgttttctaaaaagttatgccggaaagtggggcggccagttaacaccatctgggttttcagctcaagttctactgcggctttatgaagacttccatctgattaaagagaacaccgcatggaccacgtagagcagagtggctatgtaggagaacaccacggcagcaatgttttcatggtagtgcctgtaggtgaagccgtcttgcatcg

SEQ ID NO: 1548 - DNA, 316 bp, Homo sapiens
aaaattctgaaatgaacatttgtttatgcagtatgacatgaatgatttaataacttatatgacaagcttaataaggctgacattcaatgaacagaaaagtaatttaccttttagtaatcagaaaaatttccaatccatttttatcttatttttaagtgtctgttattaaagcttgtgatttttattaatgtgaataagccaaagggtgattgtttttgacacacggcattgtgccatagtaaaatgggtagtatccttctcagttaacctttaatactctgtacacactattctgaaatactgtggtgaagtaagg

SEQ ID NO: 1549 - DNA, 337 bp, Homo sapiens
cctgtggaatgcagcattacctgctggacagagcagggcaggcagttctatgccttggagctcctgactgcagggactctgtccccacactcaaaaagactcagctcactcaatgagagaatgtgatttactttatagaacgtataatcaactttgttgaataatttgttctattaaggctgtctaaagtatgtgatgtcttcatcatagtatgaagtgttgaaaattaataacgagcctagtttaggaaaaagctgcttaaaactgtggctctaagagagtaatcataaaataccttagataaaattgcactatggaattttcattgagtatgttt

SEQ ID NO: 1550 - DNA, 403 bp, Homo sapiens
ccttgggaacatatgctgtgctctcttctacaggcgctgtgtggaagaaccaatagcagttgttaaatagctgtggaatttcctccacaatccacatagtgatgtgtctccaaggagctctgggtcatgaggccaatgtatgaagtcttcactgaagttcgcatgaagatcactatgttgtgcaccaggatctcaggtaccgtgcagaagaagtacacataggaaaacggtcctcccatctcggccttcccggtaaaattcaccagttgctcactccgaggtggaataaggaagacgttagtagtcacatatgtactgaccactgtgttcatgtactgaatctggctggacaggctggtcactgccactgtgtagaagttggagttcctgattttcagggtgg

SEQ ID NO: 1551 - DNA, 548 bp, Homo sapiens
aaaatcttattcaaaatattaaataatagtttcagatatgaaaaaaattactgcaataaaacggttcaggggtatttccattgtgcttcccttccctattaggaaagtacactgtccgcccaagagacaggatggacggccttcttccagctctacataaagcgcaagcccactggctcacccgggtcctgcttaacatatattagggctatgttttctaaaaagctgtagtgacacttgtaagtcaaccatggttcaaatcacatatttacatattgatcaattctttatgatagaaagacagacataaatgaatcccatagtaaatactttccagttgccataaaaaacaaaaacaaagaaaacaagtgtgggggaaaaaaggtaattgtacacaaatatcctttatgtatacaaacaacttcattcaggtataattttaatttgaaagacctaggtacagtattatttaagtgataatgacccctaagatttattcaaatttactgtaaaataataaacgaagtaaacgaatctgatataatttt

SEQ ID NO: 1552 - DNA, 398 bp, Homo sapiens
cctgtttgaatgcctggccctaaacctgcactgcttggggggacagcagatggagcttgctgctgttatcaatggccgaattcgtcgtatgtctcgtggggtgaatccctccttggtgagctggctgaccactatgatgggactgaggcttcaggtggtactggagcacatgcctgtaggccctgatgccattctcagatacgttcgcagggttggtgatcccccccagccacttcctgaggagccaatggaagttcagggagcagaaagagcttcccctgagcctcagcgggagaatgcttccccagcccctggaacaacagcagaagaggccatgtcccgaggtccacctcctgctcctgaggggggctcccgggatgaacaggatggagcttcag

SEQ ID NO: 1553 - DNA, 303 bp, Homo sapiens
agctttattttcatctctcatcttttgtcctccttagcacaatgtaaaaaagaatagtaatatcagaacaggaaggaggaatggcttgctggggagcccatccaggacactgggagcacatagagattcacccatgtttgttgaacttagagtcattctcatgcttttctttataattcacacatatatgcagagaagatatgttcttgttaacattgtatacaacatagccccaaatatagtaagatctatactagataatcctagatgaaatgttagagatgctatatgatacaactgtgg

SEQ ID NO: 1554 - DNA, 143 bp, Homo sapiens
aaaaaagggcctaaattgtttatattgtagtttgtaactcacaaagtaatatttgatattgtatttttattactgtatcgttgtcgttatgtattgtgtaatactcaggtttgaaggctttctgaattctgataaatgttcag

SEQ ID NO: 1555 - DNA, 503 bp, Homo sapiens
aaattcttgtcactggcccaatctttttcttaagtttaaggaagctgcagagctggactacaagttacattcttcagctaatacgtgcttttctaatattttccccgagatattacatttagaaaatacgcaaagaaaccttttaggagtaaacaaaacgcacccgaactattcattataaaggaaagaataaaaaatccataaataatacattgtaatcaaataatataaagtattctgcagacataattttttttaattaataaactccttttaatttactcaccacaaatattaaaatgttcaagtgcacttgtttaattaataaagcattttatatgcaattattaagtgctaatcattaggaagtttacgttgttgaggcaaatcactagctcagacattaaaaaccattataaaaatatagctacaaggtcagtatcaaattacccttccataggacagctcaaggacagcttctatgtgatactagaaactttttt

SEQ ID NO: 1556 - DNA, 256 bp, Homo sapiens
  misc_feature 58: n = A,T,C or G
gcttgttaagatagttaagcgtgcataagttaacttccaatttacatactctgcttanaatttgggggaaaatttagaaatataattgacaggattattggaaatttgttataatgaatgaaacattttgtcatataagattcatatttacttcttatacatttgataaagtaaggcatggttgtggttaatctggtttatttttgttccacaagttaaataaatcataaaacttgaaaaaaaaaaaaaaaaaaaa

SEQ ID NO: 1557 - DNA, 548 bp, Homo sapiens; identical to SEQ ID NO: 1227

SEQ ID NO: 1558 - DNA, 293 bp, Homo sapiens
aaagtattccctgagcatataggggaagatgttcttcgccctgccatgttagctaagtttcgagttgcccgtctctatggcaaaatcattactgcagatcccaagaaagagctggaaaatttggcaacatcattggaacattacaaatttattgttgattactgtgaaaagcatcctgaggccgcccaggaaatagaagttgagctagaacttagtaaagagatggttagtcttctcccaacaaaaatggagagattcagaaccaagatggccctgacttaatccttgttttt

SEQ ID NO: 1559 - DNA, 409 bp, Homo sapiens
aaaaaacttagagagagagagagaatcaaaataacctatgaagatttatagaaaacacaccaggtaaggaagggttctttcaaagcaaccacaggaacagttacgataacttaaaaagaaatgctttccacactgaactgacagcgctgcagcccacgcctgagtggggacggcagccccaagcccaggggcaagcgcccacaggctggacccaggccaggcacacctggggagtctcttgctgctgaaaacctcagccatctcacttcatgtacttatcctgctggtcagccaggattttggcggaggacttggcatcatagaaaagttcactgatctcttcgacatgctctttctcaatgctgtccttcccgttgattttagcaagcaagttggccggggtcagcag

SEQ ID NO: 1560 - DNA, 561 bp, Homo sapiens
  misc_feature 517, 526: n = A,T,C or G
cagagttcctgaactgaatgttcaaaatggagtgttaaaatcgctttccttcttgtttgaatatattggtgaaatgggaaaagactacatttatgccgtaacaccgttacttgaagatgctttaatggatagagaccttgtacacagacagacggctagtgcagtggtacagcacatgtcacttggggtttatggatttggttgtgaagattcgctgaatcacttgttgaactatgtatggcccaatgtatttgagacatctcctcatgtaattcaggcagttatgggagccctagagggcctgagagttgctattggaccatgtagaatgttgcaatattgtttacagggtctgtttcacccagcccggaaagtcagggatgtatattggaaaatttacaactccatctacattggttcccaggacgctctcatagcacattacccaagaatctacaacgatgataagaacacctatattcgttatgaacttgactatatcttataattttattgnttattttgngtttaatgcacagctacttcacaccttaaacttgc

SEQ ID NO: 1561 - DNA, 311 bp, Homo sapiens
  misc_feature 8, 9: n = A,T,C or G
aaaggcanngctttattttcatctctcatcttttgtcctccttagcacaatgtaaaaaagaatagtaatatcagaacaggaaggaggaatggcttgctggggagcccatccaggacactgggagcacatagagattcacccatgtttgttgaacttagagtcattctcatgcttttctttataattcacacatatatgcagagaagatatgttcttgttaacattgtatacaacatagccccaaatatagtaagatctatactagataatcctagatgaaatgttagagatgctatatgatacaactgtgg

SEQ ID NO: 1562 - DNA, 434 bp, Homo sapiens
  misc_feature 3: n = A,T,C or G
tgntggccccataagattataatggacctgaaaaattcctattgctagtgatgtggtcattgtaaagctgtagcacaacacattacccacgtttgtggtgacagtcatataaaagtatggtacatataattatgtacagtgcatacataatacttgataatatgttactggtttgtgtctttgctatgctttttatcattattttagggtatactacttaaaatgttaactgtaaaacagcttctgacaggtccttcaggaagtactccagaagaaggcattgttatcatagaaggtgacagcttcatgtgtgttattgcccctgaagaccttccagtggtacaagatgtggaggaggaagacagtgatactgaggattctgaccctgtgtaggcttaggctaatgtgtgtgtttatatcttagtttttcacaa

SEQ ID NO: 1563 - DNA, 526 bp, Homo sapiens
  misc_feature 452, 466: n = A,T,C or G
aaaagtagcaaggacatgtaaacagaaattgcttctatatattttaatacaaaatccacatttattattagcaccaatgatttaacttacaaatatattctgactccctggttttaagagcaatagcttaagttaaatacacagttcatctcttccaaagtcaaaaacaataaaataaaataacaccgacaagcaatagtagcaatggcaatttgaaaacatatactttaagttaatgggacttcaatagctcagtacaaactatataataatatgtagcatagatgtcagttgactttgattcttacagtctgttgtaatcagtttcatagactttagtcacagtttctgtgtaactagagttacctggccttcccagttctgaggggctttctaatacagagctccactgtttttatgacagtaccacagtatcttcctccttctgcggnctctctgtttttgncttgcttatgcttcttcaactctgcgcctggataactttcatgttaatccattctgagtc

SEQ ID NO: 1564 - DNA, 316 bp, Homo sapiens
  misc_feature 43, 76, 144, 191, 227, 242, 265, 268, 273, 277, 282, 296,305, 306, 307: n = A,T,C or G
gcttttttttttttttttttttttttttttttttacgtgtaanatttttattcaaatttgatttacattccaaaanaaattataaaatgtattcacttgtttataaaaaaaagggggggggggacaaaactttaattcaaattntaaaacatgataaattttcaaattaaaattgggcaagttgcttggantaacaagtttttaaatcaccattttccacctccacnccaaggataaccttntaattaatgatcagccatgttgnaanagganagcnctganacttgaggaaacanaaaaactgnnnagcttttcc

SEQ ID NO: 1565 - DNA, 239 bp, Homo sapiens
ctgactttattgctctgggggcagggggctcaggagctcttggtggggcgggtccgcttcctcttcaccatcacaggcttctggctgcgcaggatggcgctggccctgcggatggctgccatgcgcaggtcggggcggtacttgttcttgcggatcatgtgtctgatgctgctgagcgtggcgcgagcattcttgttgatggtggtccgcacataggaggtggcaggcttccgctggcc

SEQ ID NO: 1566 - DNA, 124 bp, Homo sapiens
  misc_feature 47, 51, 66, 79, 81, 89, 109, 113, 114: n = A,T,C or G
ttttttttttttttttttttttttttttttttttttttttttgactnttanaaaagtttatttaanaaaaagtttaatntnaaaatgtncatgacctaatttttacatnatannaaaacaggcc

SEQ ID NO: 1567 - DNA, 257 bp, Homo sapiens
cctcagttaggacgctcggcgcccaaatctcatcagttttattgcctgctcgattatatagaaaaatacaaaaaatctgcattaaaaatattaatcctgcatgctggacatgtatggtaataatttctattttgtaccattttcttgtttaactttagcatgttgttgatcatggatcatactccccttgtttctttgggtgagaagggatcgcagtttggaaactccggcggctgcgtgcggggtttcagtcccag

SEQ ID NO: 1568 - DNA, 80 bp, Homo sapiens
  misc_feature 11, 20, 21, 59, 61, 65: n = A,T,C or G
ctgctcttctnttcctaatnngggagctataaagcagtttttactcccaacacaaattntngatnaaaaccatactcttt

SEQ ID NO: 1569 - DNA, 618 bp, Homo sapiens
  misc_feature 549, 589: n = A,T,C or G
ctgcgcgcgccccccagtcccgcacccgttcggcccaggctaagttagccctcaccatgccggtcaaaggaggcaccaagtgcatcaaatacctgctgttcggatttaacttcatcttctggcttgccgggattgctgtccttgccattggactatggcttcgattcgactctcagaccaagagcatcttcgagcaagaaactaataataataattccagcttctacacaggagtctatattctgatcggagccggcgccctcatgatgctggcgggcttcctgggctgctgcggggctgtgcaggagtcccagtgcatgctgggactgttcttcggcttcctcttggtgatattcgccattgaaatagctgcggccatctggggatattcccacaaggatgaggtgattaaggaagtccaggagttttacaaggacacctacaacaagctgaaaaccaaggatgagccccagcgggaaacgctgaaagccatccactatgcgttgaactgctgtggtttggctgggggcgtggaacagtttatctcanacatctgccccaagaaggacgtactcgaaaccttcaccgngaagtcctgtcctgatgccatcaaagagg

SEQ ID NO: 1570 - DNA, 385 bp, Homo sapiens
aaaacattgttttctaaacactaacaaaaaaaattaagggcaaactgaaaatacaaatgagatttacaggcactgtgtgtagaatgtgcaaaaattcacttagcttttcttttgtttttttggtgttgctttaagaaactttatcaaatatatttcttacaaatataaagctttctctcccaattgaaggcaattaaaaaaattcaaagtttatcaatactcagtacacaggtgaaccagtcaaattcattttctttctggaaaagaataacaaaccaatatttaggatgttcagagactcaacaaaaaccattctagaaatcacccagaacaattgttttctgttgccaaagccttttgttcttcaaaagtcaccatccaccag

SEQ ID NO: 1571 - DNA, 489 bp, Homo sapiens
  misc_feature 79, 81, 88, 103, 209, 240: n = A,T,C or G
cgtgaataccaagacctgctcaatgttaagatggcccttgacattgagattgccacctacaggaagctgctggaaggcnangagagcnggatttctctgcctnttccaaacttttcctccctgaacctgagggaaactaatctggattcactccctctggttgatacccactcaaaaaggacacttctgattaagacggttgaaactanagatggacaggttatcaacgaaacttctcancatcacgatgaccttgaataaaaattgcacacactcagtgcagcaatatattaccagcaagaataaaaaagaaatccatatcttaaagaaacagctttcaagtgcctttctgcagtttttcaggagcgcaagatagatttggaataggaataagctctagttcttaacaaccgacactcctacaagatttagaaaaaagtttacaacataatctagtttacagaaaaatcttgtgctagaatacttttt

SEQ ID NO: 1572 - DNA, 566 bp, Homo sapiens
aaacattacccagcatcattgtttataatcagaaactctggtccttctgtctggtggcacttagagtcttttgtgccataatgcagcagtatggagggaggattttatggagaaatggggatagtcttcatgaccacaaataaataaaggaaaactaagctgcattgtgggttttgaaaaggttattatacttcttaacaattctttttttcagggacttttctagctgtatgactgttacttgaccttctttgaaaagcattcccaaaatgctctattttagatagattaacattaaccaacataattttttttagatcgagtcagcataaatttctaagtcagcctctagtcgtggttcatctctttcacctgcattttatttggtgtttgtctgaagaaaggaaagaggaaagcaaatacgaattgtactatttgtaccaaatctttgggattcattggcaaataatttcagtgtggtgtattattaaatagaaaaaaaaaattttgtttcctaggttgaaggtctaattgatacgtttgacttatgatgaccatttatgcac

SEQ ID NO: 1573 - DNA, 384 bp, Homo sapiens
ctcagttgtgctgtggagaatggatcggagggacaagaggggcagcagggatggtgggctggagtagggtgctggcaatgagggagtctggctcagatgtgggatgtgtatggaagaatataaatgatggtgtggatgtcagggtgagggaggagacaaaaccacgatgacccctagctttgtggcctgaactgtgggtggctgaggggatcgttaattgaatggggcagactgaggcttgtgaggaagatcagagtctggttcttgacatgagatgcccttcagacatctcttcactcaggtccaactagggatacagaaacactgaatatttcaacagcagaaattgaatggggggattgatagcgctggcgagggaagcag

SEQ ID NO: 1574 - DNA, 307 bp, Homo sapiens
  misc_feature 73, 113, 201, 204, 206, 220, 252, 294: n = A,T,C or G
caagctttttttttttttttttttttttttttttaaactcaaaaatagtatttttattgctggttatgctttnttaaaaataaaaaatattcttgatcgatgtgactttccanaatgtttgaaacaccagtgaccaaggatcactatatatgtctccaaacaattctaccatgcttatttacacagcactcaccaaaccanaananaggctgggatattntaaggccaatgcactgagcatcagtattaaanaaccatgaatgatgcgacaattgaattattttctacctcctntgcccacccttac

SEQ ID NO: 1575 - DNA, 387 bp, Homo sapiens
ctcaaaatctagcaaaggaagtagtctgcattggtgtgcattacagtattttgcttaatgaaagcctcagttctgaatgttgatatgagtagttaaaaggaagtggggccattttatgtgtttatctgtgtcaagtatttctggtaataagaagcacttaatttacacatattttaatcctgtgaaagattccacatagagaaaagaaagatacctaaccttcaacaaatgttatttttggaaacacaatttttgtcattaaatgttatattatttcacatatataaaacagatgttatgtaagaatgttgtatattttaacataaatcatttagagaaattatctagattcattaattttcatagtgcctttttcacatgagtcag

SEQ ID NO: 1576 - DNA, 437 bp, Homo sapiens
gtcctgcagttgaaataactggaaatgatgaataccagtcctatcagattttattgctccaacttatatggcagagtgaatactgcgtgttcagaaaccttgtgatgtcttgactgttgcaccaggctgagaaagcagcaatattgatattataaagataaaaatttatcaacattccttaacaggaaattacatggttgagaggaaatgcataaaatgaaagatgaaaaatctatagtagcagtttatattttcatgattgttttgcctcatttattaaatatttgagaaatctttggagatacatagttttattgaaagctaaaaataggttctaaagtaatgtaaaaatataaagcacaaatatacttgaatattgcttaaagaattgtgtgaatagcaacatatattatggatatatactttgtgatattttt

SEQ ID NO: 1577 - DNA, 557 bp, Homo sapiens
aaaggctcacaacactgaagatttcacatgaaagggtcatgattgatttgagcaatcaagggttacatgacaggggctgcatgcaccggtggtcagagagaaacagaacagggcagggagtttcacaatgttcttctatacaatgtctggaatctacgaataaaatcagtttttaagttatgagttgattttttattattaggtttaggccaggcaggcccagggctgcctgtctttaacttcacttccttgtttttttcttaaaacaggtactgagtataaaacaataaaacaatatgagtgggtctctctcttccctcatttcctctctttgagactctcactttttattagtgggagttctcactcttatttttgctatttatgtctttttgtgcaatagattgatagtgatttatacagtatgcttgtgctgaagtattttggtgaactaaggtagcgacgaagttttttatcatttggagaaatacaggtatcagacaagggagcagtaagcaggttcctgttactattattactcttattataagagtttt

SEQ ID NO: 1578 - DNA, 371 bp, Homo sapiens
aaatcatttatctggatttttatgttttattagcattttcaagaagacggattatctagagaataatcatatatatgcatacgtaaaaatggaccacagtgacttatttgtagttgttagttgccctgctacctagtttgttagtgcatttgagcacacattttaattttcctctaattaaaatgtgcagtattttcagtgtcaaatatatttaactatttagagaatgatttccacctttatgttttaataccctaggcatctgctgtaataatattttagaaaatgtttggaatttaagaaataacttgtgttactaatttgtataacccatatctgtgcaatggaatataaatatcacaaagttgttt

SEQ ID NO: 1579 - DNA, 429 bp, Homo sapiens
cctttgactggtccccagtggtgacctatgtgtgtgatcttgaagggaacagagtcaagggtccagagaaggaggagaagttgagacaggcggtcaagcaggtgctgaagtgtgatgtgactcagagccagccactgggggccgtccccttacccccggctgactacgtgctcagcacactgtgtctggatgccgcctgcccagacctccccacctactgcagggcgctcaggaacctcggcagcctactgaagccagggggcttcctggtgatcatggatgcgctcaagagcagctactacatgattggtgagcagaagttctccagcctccccctgggccgggaggcagtagaggctgctgtgaaagaggctggctacacaatcgaatggtttgaggtgatctcgcaaagttattcttccaccatgg

SEQ ID NO: 1580 - DNA, 408 bp, Homo sapiens
ctgataccgccgtcctggggacttgggcttcttgccttcataaggcacagagcagatggagatgggacagtggagccagtttggttttctccctctgcactaggccaagaacttgctgccttgcctgtggggggtcccatccggcttcagagagctctggctggcattgaccatgggggaaagggctggtttcaggctgacatatggccgcaggtccagttcagcccaggtctctcatggttatcttccaacccactgtcacgctgacactatgctgccatgcctgggctgtggacctactgggcatttgaggaattggagaatggagatggcaagagggcaggcttttaagtttgggttggagacaacttcctgtggcccccacaagctgagtctggccttctccag

SEQ ID NO: 1581 - DNA, 492 bp, Homo sapiens
tttactttctgcaccccaattgggaatgcaatattggatgaaaagagatgtttctggtattcacagaaagctagatatgccttaaaacatactctgccgatctaattacagccttatttttgtatgccttttgggcattctcctcatgcttagaaagttccaaatgtttataaaggtaaaatggcagtttgaagtcaaatgtcacataggcaaagcaatcaagcaccaggaagtgtttatgaggaaacaacacccaagatgaattatttttgagactgtcaggaagtaaaataaataggagcttaagaaagaacattttgcctgattgagaagcacaactgaaaccagtagccgctggggtgttaatggtagcattcttcttttggcaatacatttgatttgttcatgaatatattaatcagcattagagaaatgaattataactagacatctgctgttatcaccatagttttgtttaatttgcttcctttt

SEQ ID NO: 1582 - DNA, 401 bp, Homo sapiens
ccaacatggcgaaacctcgtctctactaaaaatacaaaaattagatgggtatggtggcgggtgcctgtaattccagctactcagaaggctgaggaaggagaatcgcctgaacctgggaggcggaggttgtagtgagccgagattgcctgggccacagagcgagactccacctgtagttccagctactcgggatgctgaggtgggaggattgcttgaagccaggagttctaggctgaagtgagctatgatcatgccagcctgggtgacagagtaagaatctggctctgtagttccagatactcgggaggctcaggcaggagaattgattgaacccgggaggcagaggttgcagtgagccgagattgtgcctctgcactcccacctgggcaacagagtgagac

SEQ ID NO: 1583 - DNA, 303 bp, Homo sapiens
aaaaacagaacttgtcactttatataaaagaatagtatgctctatttcctgaatggatgtggaaatgaaagctagcgcacctgcactttgaattcttgcttcttttttattactgttatgattttgctttttacagatgttggacgattttttcttctgattgttgaattcataatcatggtctcatttcctttgcttctttggaatatttctttcaacacattcctttattttattatacattgtgtcctttttttagctattgctgctgttgttttttattctatttacaggatgattttt

SEQ ID NO: 1584 - DNA, 575 bp, Homo sapiens
aaattttacagaatagactgaggcataaggcgggaattaagtatcttttaatttatctcacctatttcacggtgaattcacacttctaaatacttactccactgctgttattatgtcccaaattcacaaaatagaacggatttcccaatctgaataaaaaacaagactcttactcctaaactatattaacagcaatatacgttaactacgattcataaacttggatgctgaagttaattcaaccatccattaaaaggaacatttcaacaattgtaaaaggaaacagagataaatctccaagccatccaacaaaatagaaacccactactaagaacactgactattttcttcaaacagagtgaagaatgggcctcatgttacacgaggcaagggaagctgctgcacagggctgttagatgcactggcccagccctgccccttccccacagccctggctgcaactcatgctcagactccctcttcctcctctaacaaagctgcttcacgcagggatgggtaggcaatgcgaactcttgcattgaccctgaccacatgctccaggactttcacatagc

SEQ ID NO: 1585 - DNA, 587 bp, Homo sapiens
atatgtatctaagaatgttctaaggcactctgggaacctataaaggcaggtatttcgggccctcctcttcaggaatcttcctgaagacatggcccagtcgaaggcccaggatggcttttgctgcggccccgtggggtaggagggacagagagacagggagagtcagcctccacattcagaggcatcacaagtaatggcacaattcttcggatgactgcagaaaatagtgttttgtagttcaacaactcaagacgaagcttatttctgaggataagctctttaaaggcaaagctttattttcatctctcatcttttgtcctccttagcacaatgtaaaaaagaatagtaatatcagaacaggaaggaggaatggcttgctggggagcccatccaggacactgggagcacatagagattcacccatgtttgttgaacttagagtcattctcatgcttttctttataattcacacatatatgcagagaagatatgttcttgttaacattgtatacaacatagccccaaatatagtaagatctatactagataatcctagatgaaatgttagagatgctatatgatacaac

SEQ ID NO: 1586 - DNA, 476 bp, Homo sapiens
aaagctatattaaaaatgtattgttgaatcaaacccctatggacttattgctttatttaactgaattaaaaagccttgatttatccaaaattgtattatagagtgtagaatgaatactagggtgataaattgcaattatttgaagaacctggtgatatgctctacttatcttggattagctaagaattctatgtatacagttggaaaaatggcatatatacatctatcttgaacctgattgaagtctgaagacctaacatattttgtttcttctagagtgtacttttcctgcctcacagttacattggtaattctggcatgtcctcaaaaatgactcatgactgtggatatgaagaactattgacttcttaagaaaaaagggagaaatattaatcagaaagttgattcttatgataatatggaaaagttaaccattatagaaaagcaaagcttgagtttcctaaatgtaagctttt

SEQ ID NO: 1587 - DNA, 627 bp, Homo sapiens
  misc_feature 563, 602: n = A,T,C or G
ccagaagataacattccatggtgaaggagaccaagaaccaggactggagccaggcgatattatcattgtgttagatcagaaggaccatgctgtttttactcgacgaggagaagaccttttcatgtgtatggacatacagctcgttgaagcactgtgtggcttccagaagccaatatctactcttgacaaccgaaccatcgtcatcacctctcatccaggtcagattgtcaagcatggagatatcaagtgtgtactaaatgaaggcatgccaatttatcgtagaccatatgaaaagggtcgcctaatcatcgaatttaaggtaaactttcctgagaatggctttctctctcctgataaactgtctttgctggaaaaactcctacccgagaggaaggaagtggaagagactgatgagatggaccaagtagaactggtggactttgatccaaatcaggaaagacggcgccactacaatggagaagcatatgaggatgatgaacatcatcccagaggtggtgttcagtgtcagacctcttaatgggccagtgaataacactcactgntggcatttaatgtgcagtagtgaatgagtgaaggactgnaatcataatatgctcactacttgct

SEQ ID NO: 1588 - DNA, 407 bp, Homo sapiens
cctcagtcagtgtgaccgcagaggacgagggcacccagcggctgacgtgtgcagtaatactggggaaccagagccaggagacactgcagacagtgaccatctacagctttccggcgcccaacgtgattctgacgaagccagaggtctcagaagggactgaggtgacagtgaagtgtgaggcccaccctagagccaaggtgacgctgaatggggttccagcccagccactgggcccgagggcccagctcctgctgaaggccaccccagaggacaacgggcgcagcttctcctgctctgcaaccctggaggtggccggccagcttatacacaagaaccagacccgggagcttcgtgtcctgtatggcccccgactggacgagagggattgtccgggaaactggacgtgg

SEQ ID NO: 1589 - DNA, 591 bp, Homo sapiens
gaaccaatgagtccctggaacgccagatgcgtgaaatggaagagaactttgccgttgaagctgctaactaccaagacactattggccgcctgcaggatgagattcagaatatgaaggaggaaatggctcgtcaccttcgtgaataccaagacctgctcaatgttaagatggcccttgacattgagattgccacctacaggaagctgctggaaggcgaggagagcaggatttctctgcctcttccaaacttttcctccctgaacctgagggaaactaatctggattcactccctctggttgatacccactcaaaaaggacacttctgattaagacggttgaaactagagatggacaggttatcaacgaaacttctcagcatcacgatgaccttgaataaaaattgcacacactcagtgcagcaatatattaccagcaagaataaaaaagaaatccatatcttaaagaaacagctttcaagtgcctttctgcagtttttcaggagcgcaagatagatttggaataggaataagctctagttcttaacaaccgacactcctacaagatttagaaaaaagtttacaacataatct

SEQ ID NO: 1590 - DNA, 566 bp, Homo sapiens
aaacattacccagcatcattgtttataatcagaaactctggtccttctgtctggtggcacttagagtcttttgtgccataatgcagcagtatggagggaggattttatggagaaatggggatagtcttcatgaccacaaataaataaaggaaaactaagctgcattgtgggttttgaaaaggttattatacttcttaacaattctttttttcagggacttttctagctgtatgactgttacttgaccttctttgaaaagcattcccaaaatgctctattttagatagattaacattaaccaacataattttttttagatcgagtcagcataaatttctaagtcagcctctagtcgtggttcatctctttcacctgcattttatttggtgtttgtctgaagaaaggaaagaggaaagcaaatacgaattgtactatttgtaccaaatctttgggattcattggcaaataatttcagtgtggtgtattattaaatagaaaaaaaaaaattttgtttcctaggttgaaggtctaattgatacgtttgacttatgatgaccatttatgca

SEQ ID NO: 1591 - DNA, 257 bp, Homo sapiens
aaccgtgcataagttaacttccaatttacatactctgcttagaatttgggggaaaatttagaaatataattgacaggattattggaaatttgttataatgaatgaaacattttgtcatataagattcatatttacttcttatacatttgataaagtaaggcatggttgtggttaatctggtttatttttgttccacaagttaaataaatcataaaactcgaaaaaaaaaaaaaaaaaaaaaaaaaaaaagcttgtac

SEQ ID NO: 1592 - DNA, 360 bp, Homo sapiens
aaaaaggtaataatctttaggataaagaaagccttttctcaacacaggtactgagcatgtttaataaaaattaaatgagattaaagagaaggggcacagccacacactccccgccccgcggtgattaggaaggtgatgcttgtgtaggtgaaagcatggagccagggcacagaagagctccgaacaccaacagtgctgcagtaagctgtctccacgtgggtggaatttctcacaatccactcacgggataggaattaattttctctccagttgcagaggggccttgtacatgaactgcgttggcatgcggaggaggggcaacacatccatgttggggaccccccccatccacagccccag

SEQ ID NO: 1593 - DNA, 285 bp, Homo sapiens
cctagatggaaagatgctggtgtcagcggggggcacaaaggtccacccagtcccacacatgcagagaggcatcatttgttgctgataacaaagtccttggtctgcagggatgccaggtgtgggtggtgaccaaaggagcagggtccatcccatttccatctaggaagatgtgacctctgtgagtgaagagaggttctacttggctccgtgttccatcttggctccgtgttccatcccaagatgtggcatcatagacctggactgtaccatcaaaacctgagatgg

SEQ ID NO: 1594 - DNA, 415 bp, Homo sapiens
ccaaatatcatctttgatgacctctcctaactcatcagcacctgcatcagaatggtcagtaaaccaggtaaagaagctctctggttcctcatgctgcctcttcctgctggctttattctgcgtttgactcgaacgtttcgtcaaatcctttccagatttccatttgatttcggtggacttcgaagatggatcaccactctcattcagatgaaattctttggagagaactttattttcaaagtaaggattttcatcaaaataaaaatctattctgtaacctgatttaatatcttcaaattctgtcacttcaactctggtcaaataatgcagtgcctcttcatcttcctccccaagcagtgcagacacttgtggatggttgacaaatgttgttacccaaaaatttgggattttggcg

SEQ ID NO: 1595 - DNA, 282 bp, Homo sapiens
aaaggggttcttgtcttctggaattccctttactagaggatcctctccagaacgttcttcaatatagttctttatttcttcagaacatttagacacttgttgtctctgcaacttcacttctttgcgaagctgctcaacttccattttcagtttttccttctctggcaaatcttcgatgtgaagggcaggcattttcgccccagaaccgggctcaggctagcctctggcagcggagccgctggaagagcggcgaagctcggcgcgtcccgaaacaactgaagg

SEQ ID NO: 1596 - DNA, 461 bp, Homo sapiens; identical to SEQ ID NO: 821

SEQ ID NO: 1597 - DNA, 505 bp, Homo sapiens
aaaatcttattcaaaatattaaataatagtttcagatatgaaaaaaattactgcaataaaacggttcgggggtatttccattgtgcttcccttccctattaggaaagtacactgtccgcccaagagacaggatggacggccttcttccagctctacataaagcgcaagcccactggctcacccgggtcctgcttaacatatattagggctatgttttctaaaaagctgtagtgacacttgtaagtcaaccatggttcaaatcacatatttacatattgatcaattctttatgatagaaagacagacataaatgaatcccatagtaaatactttccagttgccataaaaaacaaaaacaaagaaaacaagtgtgggggaaaaaaggtaattgtacacaaatatcctttatgtatacaaacaacttcattcaggtataattttaatttgaaagacctaggtacagtattatttaagtgataatgacccctaagatttattcaaattt

SEQ ID NO: 1598 - DNA, 555 bp, Homo sapiens
aaacattacccagcatcattgtttataatcagaaactctggtccttctgtctggtggcacttagagtcttttgtgccataatgcagcagtatggagggaggattttatggagaaatggggatagtcttcatgaccacaaataaataaaggaaaactaagctgcattgtgggttttgaaaaggttattatacttcttaacaattctttttttcagggacttttctagctgtatgactgttacttgaccttctttgaaaagcattcccaaaatgctctattttagatagattaacattaaccaacataattttttttagatcgagtcagcataaatttctaagtcagcctctagtcgtggttcatctctttcacctgcattttatttggtgtttgtctgaagaaaggaaagaggaaagcaaatacgaattgtactatttgtaccaaatctttgggattcattggcaaataatttcagtgtggtgtattattaaatagaaaaaaaattttgtttcctaggttgaaggtctaattgatacgtttgacttatgatgacca

SEQ ID NO: 1599 - DNA, 543 bp, Homo sapiens
  misc_feature 452, 455: n = A,T,C or G
aaaaaaagcatgggaagatttttatttatcaaaatatagaggaaatgtagacaaaatggatataaatgaaaattaccatgttgtaaaaccttgaaaatcagattctaactggatttgtatgcaactaagtatttttctgaacacctatgcaggtcttatttacagtagttactaagggaacacacaaagaattacacaacgttttcctcaagaaaatggtacaaaacacaaccgaggagcgtatacagttgaaaacatttttgttttgattggaaggcagattattttatattagtattaaaaatcaaaccctatgtttctttcagatgaatcttccaaagtggattatattaagcaggtattagatttaggaaaacctttccatttcttaaagtattatcaagtgtcaagatcagcaagtgtccttaagtcaaacaggttttttttgttgntgnttttgctttgtttccttttttagaaagttctagaaaataggaaaacgaaaaatttcattgagatgagtagtgcatttaattatttttt

SEQ ID NO: 1600 - DNA, 319 bp, Homo sapiens
ccatgactgaggaaaggagctcacgcccagagactgggctgctctcccggaggccaaacccaagaaggtctggcaaagtcaggctcagggagactctgccctgctgcagacctcggtgtggacacacgctgcatagagctctccttgaaaacagaggggtctcaagacattctgcctacctattagcttttctttatttttttaactttttggggggaaaagtatttttgagaagtttgtcttgcaatgtatttataaatagtaaataaagtttttaccattaaacaaaaaaaaaaaaaaaaaaaaaaaaaaagcttgt

SEQ ID NO: 1601 - DNA, 552 bp, Homo sapiens
aaaaggctagaattacctcaaaaatagtcttgaaataatactgagtccttctaaagagctcactggatattttaataacatttacagaaagacaaaatttgcagtagctgagtttaagtgaagaataatgtagaactaacgtgggctaaaatgtttcataattaatgtcaaaaattgccaagattattaatatatattttggtaatcactattgaccaggttaatttttttgtgcaaaatacactatgtattaatagaacaggaaaataattatttcagaccactaacaaaagaaaacccacagcaagagaagcatctgtagggcaattaaacgttagggaagtttactagctttagaatacatcaatatacttccataaacaagagtgttttaatgtacttttagtaacgacccaatctaaggagccttggaggcttgtgaaaaagacgtccacaaagatgctgcatttctagtgtggggtgaattaaaatacttctgtaagaaggagggaactgaatcacctcagcatgaataaacagcatttttctttt

SEQ ID NO: 1602 - DNA, 438 bp, Homo sapiens
ctgaaaagccatctttgcattgttcctcatccgcctccttgctcgccgcagccgcctccgccgcgcgcctcctccgccgccgcggactccggcagctttatcgccagagtccctgaactctcgctttctttttaatcccctgcatcggatcaccggcgtgccccaccatgtcagacgcagccgtagacaccagctccgaaatcaccaccaaggacttaaaggagaagaaggaagttgtggaagaggcagaaaatggaagagacgcccctgctaacgggaatgctaatgaggaaaatggggagcaggaggctgacaatgaggtagacgaagaagaggaagaaggtggggaggaagaggaggaggaagaagaaggtgatggtgaggaagaggatggagatgaagatgaggaagctgagtcagctacgggcaagcgggcag

SEQ ID NO: 1603 - DNA, 559 bp, Homo sapiens
  misc_feature 203, 439, 503, 526, 529: n = A,T,C or G
ttttttttttttgtaaatgaaaagtatggttttattgtatcttcttgtcaaacacctttacttgaggcaacaactgaagtataatttaattcagcaggaaatatcacacttggagggaaaacacacactaaaaaaaaaacccttaaattaaagccaaacattctttccaaggcacagcactggcattttcagattgacagcanaacgagtttgtttccgtgaaacaaaatcatgagtccagagtctgtttttgaaacagctttccacttcatctccctttctggggctcagggaacgatgctcgtggccttcctcagggccaggtagccggtgacgacgtcagagggcagcctccgaatgtaggaaaactcttcaatggtgctgaaccgcagtttgctctgggggtctgtgtagttggcaagcagacctgaaacatcanaatacttcttagctggcttaaaggatggaggagcatcaatactgaagtagttaggatcgttcanttgccacggcaatgccctttcanaancgaggatttgtttcaggttcttccaggttc

SEQ ID NO: 1604 - DNA, 535 bp, Homo sapiens
  misc_feature 29, 31, 60, 79, 136, 196, 199, 258, 273, 297, 306, 329, 332,347, 377, 400, 464, 490, 504, 513: n = A,T,C or G
ttttttttttttttttttttttttgcgananaaaaaatttttattgtgatataaaatgcncttataaaatgtccaccanaaggcatgtaattcttcactgctatataaatttactgggaatatgttattcaccatntaggtatgatactgccaactaaaacatactgtaaacgatgagttatactctataacaaangcntcactgattttcagcaatcattggtttaataataattagtttaagactataatcacatntatattctggaatgnccatttactttaatgtagtgtagnggaatttanagtataattgcacatagatggtncanaaaaacattcacttntaaattattttataccttcatgacaggtantcttcctgactgaaaataacagnttcagctatggtctgctccaggattcttaatgcaataatttgggtgtatgtgtgtctgtctacntgtacacccatggaacaacttatatntttagtaaacaagngcaacattnttgtcagttattttgcatgttt

SEQ ID NO: 1605 - DNA, 471 bp, Homo sapiens
ccatggcaaccaaaggaggtactgtcaaagctgcttcaggattcaatgccatggaagatgcccagaccctgaggaaggccatgaaagggctcggcaccgatgaagacgccattattagcgtccttgcctaccgcaacaccgcccagcgccaggagatcaggacagcctacaagagcaccatcggcagggacttgatagacgacctgaagtcagaactgagtggcaacttcgagcaggtgattgtggggatgatgacgcccacggtgctgtatgacgtgcaagagctgcgaagggccatgaagggagccggcactgatgagggctgcctaattgagatcctggcctcccggacccctgaggagatccggcgcataagccaaacctaccagcagcaatatggacggagtcttgaagatgacattcactctgacacatcgttcatgttccagcgagtgctggtgtctctgtcag

SEQ ID NO: 1606 - DNA, 386 bp, Homo sapiens
caaatttcaaagctcttttaatgtaatggacaaaaataagatatgagaatattattgatgaattttcataaggtggaattgatcttaatctactaacagagaagggtagacagtttgtgttaaatgttggtatttacttgtattgaccaaagttttgcagctctactatattctgtgctcaggactaaaatgctgttaatttttttttttccagtgctgtgcatatattctgtgatgggaaacattgttgatgtcctaacagaaatatattttgatctattttcctatggagttgtttctattatgaccatttaattttgtttttatttaatagtagtatttccttcccttttatctaattttttatatgctgctaaatatatttt

SEQ ID NO: 1607 - DNA, 419 bp, Homo sapiens
aaatgtcaccagtgtcacaaatggagcacatcctgaagccacttcagagcaaccacagcagaacagtacacaagactctggactacaggaaagtgaaatatcagcagaaaatatcttaactgtagccaaggatccaagatatgccagatatctcaaaatggttcaagtgggtgtaccagtgatggcaataagaaacaaaatgatatcagaaggactagacccagatcttcttgagaggccagatgctccagtgcctgatggcgaaagtgagaaaactgtagaagaaagttcagatagcgaatcttcttttagtgattaagcttaattttgataagaattgcatatgcatgcataggggtacatttacattctgtaagagattgagcctgaactctcttagtcataaaaacatcaaatgg

SEQ ID NO: 1608 - DNA, 555 bp, Homo sapiens
  misc_feature 252, 547: n = A,T,C or G
gtggcaaggcatccctctagagaacaactaattgattacttgatgctgaaagtggcccaccagcctccatatacacagccccattgttctcctagacaaggccatgaactggcaaaacaagagattcgagtgagggttgaaaaggattcagaacttggatttagcatatcaggtggtgtcgggggtagaggaaacccattcagacctgatgatgatggtatatttgtaacaagggtacaacctgaaggaccngcatcaaaattactgcagtcaggtgataaaattattcaggctaatggctacagttttataaatattgaacatggacaagcagtgtccttgctaaaaactttccagaatacagttgaactcatcattgtacgagaagtttcctcataagcactgtggacaaaaaaagcggggaagacagcaagatttattggaagatacttacaggggaaattaatattttgactatttttatatataaagaagaactcaaaaaattatgttcaaatttgtacattaatgaaataatggaacttgnggttagag

SEQ ID NO: 1609 - DNA, 306 bp, Homo sapiens
aaaaatattttgttacaaaaggaaaaaaatacaatgcagtataaaagattgacagcgtcatcaagtttattacacaattttcaacctatcagaaagacaaacaaatcaccgacaacagggggacgggaccttggcctttttgagggatgggtgttttttttccttttgctatcaggaaataaaactaaaaatggtgtcattgagtaaaaacaaaacaaatggggagaaaaaaattctccgggtaaacggcatttctggtattctatatatatttttccttaaactgtcaccttttctctacatttt

SEQ ID NO: 1610 - DNA, 273 bp, Homo sapiens
aaagcagcaaaaggcactttttttttcaggccagagtgaatctaaaacaaacctggctttgcttacagggaagctgtcccagaaggactgagtgatgcctcttgttccctaaggtctggagagtctttgcaagtttccaacgacatttccaaccaggtgggagagaccagcagttgacgagacaagtcagacccaaaaaacgacgccaaggtagtgagtgggtgccttaatgtgatgtaagaggaaggtcttctctggctttcagggaaacag

SEQ ID NO: 1611 - DNA, 406 bp, Homo sapiens
cctagatctgagatcgctgtgaaacattaaagtgacctcaccatacttgttttctcactcagatacacattttatttcatcaacacatcttgatttctattacttttttcaatataacaaaatgttttagagatatatatgaaaaactactgctgtagttagacctcattataaatattggtgactgggcaccatgtgagaagaccacgatatcatacaaagggagccaatgagctgttggacaaacgcgtcaaggctgaaccaaaattgtgacgctctcagcgcaactttgatctgaactcttgacaggtgggcatccaacatccctgctccttgaccctctgcaggattccagaaggcccccagtgaagtcatcaggctccgtacacaggcaccgtgggggagg

SEQ ID NO: 1612 - DNA, 86 bp, Homo sapiens
tgccaacggccgctgtgcccacctcatcagcagctctgcaggggcctcactccaccctcaccaaacacgaggagccagcactcctg

SEQ ID NO: 1613 - DNA, 459 bp, Homo sapiens
  misc_feature 448: n = A,T,C or G
aaggaaaagaataagtattcttgcatctggccttagaaatgtgaagttatattctcaagtttatttttttccaagtgtagctaaaatatttttgcaggtaaaataaagctgatagtacatgtgttgttcaaaccttgttaaacctaatattgaactatttttatatctgctgtctttcagaaggcaaataggaaactatatatttgcttaaaaattggcatttagtaaccttaattctttttatagaaggaatgacttaaagtattgtcccctctttttgcactaattgtggatttttttagatgcttctcaaaattttcagtgtgtaagctaaacaaaaactaaaactaagaattctcaaaaagacttgttcaaaacagggaaagactgatgaaaagtaaaatggactacttttgtaacttacctgtttgttaggaaatggaatggnttctttgattt

SEQ ID NO: 1614 - DNA, 320 bp, Homo sapiens
gatgaagaggcatgggaggaaaaatatccaaattaattactaaaatcgagaagagaaggcaaactcttgaaaagtaaaaaggtgtttgtgaccttcagtatttattgaacagaggaaataactgacaagggcaatacaattcaatgttcatgtagtaacattcatgtcacttgttgaatttggttctcatatgtatattgcatacacataaattcaaactataagtcgtcatttttgagccatcatcttacattcatgtaatgaaattatggaagagagtaaaaactagctcttaacttagtaaatataatatggtattt

SEQ ID NO: 1615 - DNA, 506 bp, Homo sapiens; identical to SEQ ID NO: 804

SEQ ID NO: 1616 - DNA, 310 bp, Homo sapiens
cctcttcaattcggcagatccacattctgaaggatgagggccactctgcttggaatgtacaccaaaagagaatagggacgcccattatgttcaaaagcctcagaaaaaaagtcagtgctgtggtccagtctctgatgccctccatattccgctgcatctgaatctagcacaattttgaatttccctggcaatgctgttccaactcggtagtcagtgtagctcttgcttggatggaagttgaaaatgaaaagaagacctgctctttcaaaagcaatgatcttattgccttcatgtttttcactcacgtagg

SEQ ID NO: 1617 - DNA, 435 bp, Homo sapiens
aaaaaatttttagttcaagtttagttcattgatattatcctctgaatgcagttaaggctgggcagaaattctactcatgtgacatctgccacaggtctattttgaagcttttcttctaatggcaatgtttgtccttaccaggatttaatctatagaattgtctctcaactctgcttttctccagttccagataacgtccttaagaccatctgttcaggggttcacaaaactcaaatttgtgtcattctattttatttattttattttttatttccttccctcataccttgcccattccctctgaatattaggtgtgatgtcaacagcatgttagaaggatcaatgggaaggcaatgattgaaaacatttcaatgaaccttaatagtgttcctttgaggagcacccaggagaatatctggtcatagatcttttttt

SEQ ID NO: 1618 - DNA, 375 bp, Homo sapiens
  misc_feature 53, 355: n = A,T,C or G
ctgaaacaaacttggcaaccatgagatgagaaaccagctagcaagtcaatcanaactttttttcaccccgtctacaatattttgtatttataactgtaaattagtgtatagtgtttcactccagagacttcaataatatagtgttatcaaaggacttgtacagatttcagagaaagacaaatttagaagacggaggattctctattatgtgctatctgagagtcagtatgaaatgtcaaatccaaaagtacataatttagaggtctacttcaaagtaatcatttgagcatagtttctccactgtcagagacgactgttattttattttcaatcaaattaaaacttgtttttatcnaaaaaaaaaaaaaaaaaaaa

SEQ ID NO: 1619 - DNA, 426 bp, Homo sapiens
  misc_feature 11, 13, 64, 320, 391: n = A,T,C or G
agaggtacacnanctgaatttcctttatttttccacagaatataaaaagaatattctgacagcnacacacattgtgctagcaaagaaaagcaaatctgtgctggatactattagtacctcttatcacagaatacatcaaatacattaaggctctttctagaattctagaacttcgaagtgtttcattcaaactaagacactacaaaggaggaaaaaaatagattttccacctttaatggaaatttccaaaaatgtctgaaaatgtctataaagtacacagcttttcagaccaaaacattagtgccttgatcattttaagnggtttagttattgtaagaatgtaagctcatgttttattactccagttatatggtactgtgccatccttaanaagtattttgaattttgaaaaaagttctcttttcc

SEQ ID NO: 1620 - DNA, 177 bp, Homo sapiens
ctggcttcttgatgtcctggaagagagcgcggccgccacgctggttttgcatcttcaggagacgctcgtagccctcgcgcttctcctcggccaattcgcggaagaagtggctcacgccttccagagccacatcatcgcggtcgaaatagaagcccagagagaggtaggtgtaggagg

SEQ ID NO: 1621 - DNA, 183 bp, Homo sapiens
cgtctacatacttcccaggcacccagcatggaaataaagcacccaccactgccctgggaaaaaaaaaaaaaaaaaaaaaaaaaaaaaaaaaaaaaaaaaaaaaaaaaaaaaaaaaaaaaaaaaaaaaaaaaaaaaaaaaaaaaaaaaaaaaaaaaaaaaaaaaaaaaaaaaaaaaaaaaaaaa

SEQ ID NO: 1622 - DNA, 534 bp, Homo sapiens
cttgcctgctgctctggcccctggtcctgtcctgttctccagcatggtgtgtctgaggctccctggaggctcctgcatggcagttctgacagtgacactgatggtgctgagctccccactggctttggctggggacaccagaccacgtttcttggagtactctacgtctgagtgtcatttcttcaatgggacggagcgggtgcggttcctggacagatacttctataaccaagaggagtacgtgcgcttcgacagcgacgtgggggagttccgggcggtgacggagctggggcggcctgatgaggagtactggaacagccagaaggacttcctggaagacaggcgggccgcggtggacacctactgcagacacaactacggggttggtgagagcttcacagtgcagcggcgagtccatcctaaggtgactgtgtatccttcaaagacccagcccctgcagcaccacaacctcctggtctgttctgtgagtggtttctatccaggcagcattgaagtcaggtggttccggaatgg

SEQ ID NO: 1623 - DNA, 484 bp, Homo sapiens
  misc_feature 266: n = A,T,C or G
ccatatgtcaactttgaaagggtggggactgtgaggtaaccccagcatcatggtcatctccatgccaggacaacagtctcccaggttaaaatatagataagacacaggtacgtgcacatttatgggggttaactatcagaaagtgaatccactttgaggtttataaaatgagaaggggatgatggtggggctgtatgtgttgggcactggtgcctattgcagtcagaattcacactgcttaattgacatcttgctggggaagaganggagatggggtggtgagagaggaagcagatgaaacaaaggaaaacgtagcttgcctgaaattgtgtaatttttttcctcttgattgtataaggcattttgaactggaaaaacgtctttcctacacactcttccaaataatcacagggaatataattgctgattcagaatacaaataagacctctttcatctttctccccactcccccgcaaaatcatt

SEQ ID NO: 1624 - DNA, 444 bp, Homo sapiens
gcatttttttgtattagtatttctattagggaacctttcttattaggtggtttgtattgtctggtttctaacatgcaggtagctgtttggcagttaaacacgtttagagtaatttgagttacaacgtgtgaaactgagcaaaaaagcagtgataagtttgggttaccataccaaatatttgttttcccactggaaaaaagtaagttttagaaaatagttaacctttgcagcatttgtttacagtttacagttccagaagtgcgtcgaaatggattacataactgctcttttattcctggtgttcacatctgtcccaggctgacacctgctcttggctggcccactttggtatgggctttaatttcactaccccaaacacgatactgtcatctgctttataataatgctcaagatgcctgataaaaatctcattttgcagccaga

SEQ ID NO: 1625 - DNA, 606 bp, Homo sapiens
aaaccagtacaagcaccatgcttaacaaaagactgtccaaaataaacatgcaatatgaactagcagagactgaaaccacagcttaaggagttgtgtcagttgttggttttgttaaacgatgacagagaactgttaaaattcacaagactaaaccattaatgtttcaagcctcctgaatgagattatcttggaccatctaaatcagtgggaactgccctggcatgttaatgatctcaaacaatattcaagtaattatatttatatgaattataatccaaaaagcaataaaatacaatttctatcacaagtttactgtatatgagcactgatttgaaatgtcaaatggcataataaaaacaaatttctcaagaatattcagcttgggagcattggttttaagcggtctagaagattactacattcttccagaaatacaaaataagatttgtccagaaatgtttgaaacacatcctcacaaaagttgtaatggctcaaactctataaattccagtattatcagtctattgaacaaatagggaaagcaaccatagtaagaatacttgaattgatagaatatgagttactctctacttccaccaaatatca

SEQ ID NO: 1626 - DNA, 423 bp, Homo sapiens
gattttttcaggagctggaagtcttagaaaagccttgtaaatgcctatattgtgggcttttaacgtatttaagggaccacttaagacgagattagatgggctcttctggatttgttcctcatttgtcacaggtgtcttgtgattgaaaatcatgagcgaagtgaaattgcattgaatttcaagggaatttagtatgtaaatcgtgccttagaaacacatctgttgtcttttctgtgtttggtcgatattaataatggcaaaatttttgcctatctagtatcttcaaattgtagtctttgtaacaaccaaataaccttttgtggtcactgtaaaattaatatttggtagacagaatccatgtacctttgctaaggttagaatgaataatttattgtatttttaatttgaatgtttgtgcttttt

SEQ ID NO: 1627 - DNA, 603 bp, Homo sapiens
  misc_feature 18: n = A,T,C or G
aaaaaatatgtatctaanaatgttctagggcattctgggaacctataaaggcaggtatttcgggccctcctcttcaggaatcttcctgaagacatggcccagtcgaaggcccaggatggcttttgctgcggccccgtggggtaggagggacagagagacagggagagtcagcctccacattcagaggcatcacaagtaatggcacaattcttcggatgactgcagaaaatagtgttttgtagttcaacaactcaagacgaagcttatttctgaggataagctctttaaaggcaaagctttattttcatctctcatcttttgtcctccttagcacaatgtaaaaaagaatagtaatatcagaacaggaaggaggaatggcttgctggggagcccatccaggacactgggagcacatagagattcacccatgtttgttgaacttagagtcattctcatgcttttctttataattcacacatatatgcagagaagatatgttcttgttaacattgtatacaacatagccccaaatatggtaagatctatactagataatcctagatgaaatgttagagatgctatatgatacaactgtggacctgc

SEQ ID NO: 1628 - DNA, 574 bp, Homo sapiens
  misc_feature 479, 559, 563: n = A,T,C or G
aaacaaacttccagagaaaactggtctctatatatttaagtaacaaatttgacaaaatacatatttatacatatatagatctctaatataaatattaaatttgaaaaaatcaaatgtgaagcagaaactgctatacaagtatattgtataatatttattttatacattaaagtatttggttgaatatacttcaattaggtttctaaaaaacaccattatctgcttcttagtaattgcgacattcttgaaaagcatgtgaaacgggtataaacttcaactctgtgcttaattcagaattcctgtttgttctcctcaaacttttatcttcctaaagcatcttgccagagactacaaaggaaaggaacatttacagagcactataaacatgtctttggacagtaaaacagtatttattcttctacactcttgattttccaatcatatcttcctcaaggcaatgtttctttggcccaatttgngcaactaaacataaaatttcaaaacacaacttttaacagtgtgatatgaaatgcagtggcagtccctgcttttcgcctgntggnttctttgaaag

SEQ ID NO: 1629 - DNA, 257 bp, Homo sapiens
ctggtgttgtgtattcccagtaccaggaaaaaaaaagaaagaaagaaagaaatgtaaaagccacattgcgttggaggtgtttccagatgctggaggccgatgaccaaagatgacctcagcacaacggagccagttcccgatccgccgccagggggcgccgcactaacatcccaggccgctcatggagccgattcggtccagcttgaggccgaagcagcccttggacaagcccttcttgttggctcctttgtatttgc

SEQ ID NO: 1630 - DNA, 595 bp, Homo sapiens
cgagatgtctcgctccgtggccttagctgtgctcgcgctactctctctttctggcctggaggctatccagcgtactccaaagattcaggtttactcacgtcatccagcagagaatggaaagtcaaatttcctgaattgctatgtgtctgggtttcatccatccgacattgaagttgacttactgaagaatggagagagaattgaaaaagtggagcattcagacttgtctttcagcaaggactggtctttctatctcttgtactacactgaattcacccccactgaaaaagatgagtatgcctgccgtgtgaaccatgtgactttgtcacagcccaagatagttaagtgggatcgagacatgtaagcagcatcatggaggtttgaagatgccgcatttggattggatgaattccaaattctgcttgcttgctttttaatattgatatgcttatacacttacactttatgcacaaaatgtagggttataataatgttaacatggacatgatcttctttataattctactttgagtgctgtctccatgtttgatgtatctgagcaggttgctccacaggtagctctaggagggctggc

SEQ ID NO: 1631 - DNA, 225 bp, Homo sapiens
aaaatacataaaattttctaaaacgtaaaatggaaaggtttaatacacaggaaaaacactgcacaccttaactaaacaaactagaaagaaaatatatttatatacagaactaagatgagtccattcattatttttacaaatattcacatagatggtttagagataagtagttaagtgtgtctcattaattaatggatgctttctagcctctgtcttcattaattt

SEQ ID NO: 1632 - DNA, 432 bp, Homo sapiens
gctgcccagactagcgaacaatacagtcaggatggctaaaggtgaccccaagaaaccaaagggcaagatgtccgcttatgccttctttgtgcagacatgcagagaagaacataagaagaaaaacccagaggtccctgtcaattttgcggaattttccaagaagtgctctgagaggtggaagacgatgtccgggaaagagaaatctaaatttgatgaaatggcaaaggcagataaagtgcgctatgatcgggaaatgaaggattatggaccagctaagggaggcaagaagaagaaggatcctaatgctcccaaaaggccaccgtctggattcttcctgttctgttcagaattccgccccaagatcaaatccacaaaccccggcatctctattggagacgtggcaaaaaagctgggtgagatgtggaataattt

SEQ ID NO: 1633 - DNA, 417 bp, Homo sapiens
ctggaattctacctcctctggactcacaaactgctcatgttgcacggacagaagctgaagtccagagccgggacgctgctgcctgtcattcagttcctccagaagagcatccagcggcacctggacgacctgtcgaaactctgtagctggaaccactataacatgcagtacgcactagcagtttccaagcagcggggcacaaaacgctccctagacccgctgggaagtgaggaggaggcagaagcatctgaagatgacagcctgcatctgcttggaggaggaggcagagactcagaagaagagatgctggcctagagccagccggttgcagcgttggattgtgccggctaagacctgccagggagatgggacccttgtgccacctgggccagcaaagaggaggggtccagagaacag

SEQ ID NO: 1634 - DNA, 311 bp, Homo sapiens
aaaggcaaagctttattttcatctctcatcttttgtcctccttagcacaatgtaaaaaagaatagtaatatcagaacaggaaggaggaatggcttgctggggagcccatccaggacactgggagcacatagagattcacccatgtttgttgaacttagagtcattctcatgcttttctttataattcacacatatatgcagagaagatatgttcttgttaacattgtatacaacatagccccaaatatagtaagatctatactagataatcctagatgaaatgttagagatgctatatgatacaactgtgg

SEQ ID NO: 1635 - DNA, 229 bp, Homo sapiens
ccaggctgatcttgaactcctgagctcatgatccacccgcctcagcctcccaaagtgctgggattacaggccccttgttcagccactgcacctggccccttattttgtttttgttttctaatatactttgatgtaatcagcttgagaaagcaacacaatttcaaatcctatcttctagatgcaagcagtgctaaatttgttaataaatttgcttttcacacctttcttt

SEQ ID NO: 1636 - DNA, 462 bp, Homo sapiens
cctccaaggtgatgggcggcaggtaacgagtcattgcctctcacgccacctggaaggctggactacttcctcctcccaactgcggggtcccagaaatcctcgggtcccagtggctgacttacaatattcaattcactctgaccaaacttcctatgagaaaatccacggtgagccaaaatgaaaagtacaaggcagtagtacaggaacctggcagccgcactggccgcccagaaacgtcagtggtgctgccccattcggcgaaaggttagggagcaggaaaagaggaagcaggagagggaaggaaagtcccatggaatatgtattccagaatccttacattttctcagccaccgctccccacgtgagttcccacccccaccccgacaagaacaaagagttctgaggatccaagaacgtgaccgggtcagacaggttcagctactgagttcacgttccagccca

SEQ ID NO: 1637 - DNA, 612 bp, Homo sapiens
attgacagattctgtgcaagaactagaaaataaaatagagaaagtagaaaaaatacagtaaaaaatataggtgatcttctttcaagcagtattgatcgaacagcaacgctccgaaagacagcatctgaaaattcacaaagaattaactctgttaagaagacgctaaccgaactaaagagtgacttcgacaagcatacagatagatttctaagcttagaaggtgacagagccaaagttctgaagacagtgacttttgcaaatgatctaaaaccaaaggtgtataatctaaagaaggacttttcccgtttagaaccattagtaaatgatttaacactacgcattgggagattggttaccgacttactacaaagagagaaagaaattgctttcttaagtgaaaaaatatctaatttaacaatagtccaagctgagattaaggatattaaagatgaaatagcacacatttcagatatgaattagtttgacattattgagattagactaaggtaatttttttaatgggacctctcatgagaagactggtaaatcaaaaataatgatattttggagcaaaagtcattttatatctaatcctattttgtacagtaaaaa

SEQ ID NO: 1638 - DNA, 215 bp, Homo sapiens
agtctagtcacaagtagcccatatctggtctacttcaaaaagtttccatttatactaccaccttaaaaatttcctcaagcataaaacatgtttataaagttacaaatttgaatgtaactaaagatacatagacattttattattacactttcatgtactgcttgataaattatgtatcagttaaaaacactaaattatctcaaggtgcattcaat

SEQ ID NO: 1639 - DNA, 286 bp, Homo sapiens
  misc_feature 40, 49, 162: n = A,T,C or G
tcatcttttgtcctccttagtacaatgtaaaaaagaatantaatatcanaacaggaaggaggaatggcttgctggggagcccatccaggacactgggagcacatagagattcacccatgtttgttgaacttagagtcattctcatgcttttctttataattnacacatatatgcagagaagatatgttcttgttaacattgtatacaacatagccccaaatatagtaagatctatactagataatcctagatgaaatgttagagatgctatatgatacaactgtcg

SEQ ID NO: 1640 - DNA, 467 bp, Homo sapiens
aaaatgtttcttaaataaaaaaaacacaaacattagcaactagttggctagccataattcctcccttgtttcgattgccagttagaagcaatttttatttcactggttatttgcaagagaaggggtaaaaaaacagcatcagagtgcaacactgaagtgagcttactttaatttgtaagtgaagctgttgctgaacatgaccactatcgttgctgaaatataaaattatactcactgattgtaatggttgaaattttcctgaataatcattagccaaagatcaactctctaatggtgctaatggcaatctagctaatgtgcaaatttaggaagtcttcagtactaagtacataattttcaaataatattttttaattgtctactttggatgttagctatgtcttgtgagtataaattccaattttaagcactattttgatgcaaaaaaatgaataaaaatttaattt

SEQ ID NO: 1641 - DNA, 141 bp, Homo sapiens
tgccccctgacctcagctacatcgtgcgagctaggcatggtggtgaggactacgtcttctccctgctcacgggctactgcgagccacccaccggggtgtcactgcgggaaggtctctacttcaaactctaagacatctgtg

SEQ ID NO: 1642 - DNA, 566 bp, Homo sapiens
aaatccagaaatctttgtactgatgtaaatgattgtagttattttggatagtgttttgctaacaaaaggagagacttttttcatgcatatttctattttgtttttttgggttttattttattttaatagtagtaaaatacttggaataatttttcatattcttgtcattaatattattttgtatttttatgtggaaatatataattttatgacactaattgctaaagtttattttatgttgaattatttttggagctgaaatctttgtaatattaaagcaactagtttctaattcccagtttctgtatagaatcgcacaagtggtttatggagtgtttggattgtaattataaatggttctttgatatgcaaattaatattttcagttgattttattttatattcctaatggggtgttaaagccgttttttatttttttctaaataaaaagagaacccatgcttttatggacactaggtaaacaccttcagcttaaatttttcgttaaatattttagtttattttattggtatcttccaggtgtctaaatctccagtctgtctgtt

SEQ ID NO: 1643 - DNA, 611 bp, Homo sapiens
aaataaagagaatatctggtgttaggagcttgttttgctgaagatttctccattcctggtgctgagaataaaggcaaccagtagccaatgtcctttagattgtctgatttctttttgttgtggagcacacctgctaactgctccctcaacataactatgaaatcatagctctgttttcaccaaagaacagaccaattaacatacttatttgcagaagtggtgtagttctacaaaacggcaaatgaagttcaacttaatattctctataatgtattattttattttattttttacaattagccttttttttagttaatttttgtcaaatgaaacgacttcaggcaagtctcttttataatggtttttcaagtgccatttattctagtttatcatgttttgcatgtttgaaagtatgaatgtgctctttcctaaaacatggcaaatgaatagatgtagagaataacaatattacttacaagatgaaatgattagattagaagtgtccctttattaaactttgtcagcctgactgggtacaattcttttgttaatttgcagtgtggtttgtatacacgtatacgtgttatcaataataagattttgcaactgga

SEQ ID NO: 1644 - DNA, 231 bp, Homo sapiens
ggctgtgtgaagtaaactaaaactctgatgaacactttggagtctgctttagtgaaggagaccaaagtgggaagggctttagggcactgatagaggccctgggtgtacttttcaatcctgtgtaatgtttaattcttgcaactgaatcaaaacagtgttaaattatggcaatatttgcactttgggaatgagtacataactgtatgatcacactctgcaaatgccactttt

SEQ ID NO: 1645 - DNA, 369 bp, Homo sapiens
ctgaacctgagggaaactaatctggattcactccctctggttgatacccactcaaaaaggacacttctgattaagacggttgaaactagggatggacaggttatcaacgaaacttctcagcatcacgatgaccttgaataaaaattgcacacactcagtgcagcaatatattaccagcaagaataaaaaagaaatccatatcttaaagaaacagctttcaagtgcctttctgcagtttttcaggagcgcaagatagatttggaataggaataagctctagttcttaacaaccgacactcctacaagatttagaaaaaagtttacaacataatctagtttacagaaaaatcttgtgctagaatacttttt

SEQ ID NO: 1646 - DNA, 439 bp, Homo sapiens
aaaaatatatctattttgaaaatattctgaaagtaattaagatcacctattgggaaggaaagagatcaacacaatgaaatttaggaagagaaatgcaaaagcagtgacctgggcacattgtgaagtaagctataaaaattccaaataattatctctaaagcaaatcctttgttagttacatggctttacatattaattactctggaaagtttttgaactctgtttagtagcagatctcctttcttgatagtttcttggtactgccagttcttgctatcaggtctgttggtttctactatttcattcactttatctattttgcagtgtagtctcccggcagcaataaacctggacagttcctgatcaatgaattccacaccaacaccaaacgcttctgccatatagccaagggttaatgacctatatgattccagcagct

SEQ ID NO: 1647 - DNA, 422 bp, Homo sapiens
gcaaggatagtcatcaacagggcccgggtggagtgccagagccaccggctgactgtggaggacccggtcactgtggagtacatcacccgctacatcgccagtctgaagcagcgttatacgcagagcaatgggcgcaggccgtttggcatctctgccctcatcgtgggtttcgactttgatggcactcctaggctctatcagactgacccctcgggcacataccatgcctggaaggccaatgccataggccggggtgccaagtcagtgcgtgagttcctggagaagaactatactgacgaagccattgaaacagatgatctgaccattaagctggtgatcaaggcactcctggaagtggttcagtcaggtggcaaaaacattgaacttgctgtcatgaggcgagatcaatccctcaagatttt

SEQ ID NO: 1648 - DNA, 420 bp, Homo sapiens
aaataaaagaacaggctcagtggtcttcctgtagaatggtttacatgcctgcatgtgcagtagttgtgtctggaatcctagaattggcactttctgcctccttgctctaaatgtcacaaaaaattatacttccttaaagtaaatgtaatgatttcttcttttcctattgaccagtacagatagatatgttgtgtttgcttcatttttaatgatgacttcaagattgatgatgtgatccaataactgtggaggtagctttaacttggttctgtgtaaatagtatgtattttattataatatttctcattttaagatgcttggtttacattaaattatggtatttaactatttttatgtttatactaggtagggtctttcttatgtttctgtgtttttggtatgctaaataaagctattttt

SEQ ID NO: 1649 - DNA, 302 bp, Homo sapiens
ctgtttaactttgagctgagtgaggggagaggggtaaagagaaagaaacttaagttttctttcacagaactccaccattgtgggctttgagagagccctaaagcattgtacctagtggtacctagtgacttccaaccaaagcctttgagtatgcactaaataggtgagaagaaaggagagaaggtttttaggttagaaacctttaaccgatagaaggatatggtatgttgtaaagctggaaccaagtttgcatttttgagggcttgagatgaagggaagactcttaccagatagtaagacag

SEQ ID NO: 1650 - DNA, 400 bp, Homo sapiens
aaaaaatagtttcttcttttatgtggattctcttaagatttgaagaaccaaactattctttggttttattatacgggaaaaacaacacgcagtctagttaaacaactttgtgatatttatattccattgcacagatatgggttatacaaattagtaacacaagttatttcttaaattccaaacattttctaaaatattattacagcagatgcctaggatattaaaacataaaggtggaaatcattctctaaatagttaaatatatttgacactgaaaatactgcacattttaattagaggaaaattaaaatgtgtgctcaaatgcactaacaaactaggtagcagggcaactaacaactacaaataagtcactgtggtccatttttacgtatgcatatat

SEQ ID NO: 1651 - DNA, 391 bp, Homo sapiens
aaagaagcgttgcagaggcccacggtctcctgggtcccggccacctgtccatattccacatttgctgactgtgctccctgcactccactcaagttgagagttcaaatagtcttgaaggggaatcagcttcaggatggaaggacccaggagaggccccgaggtgggagggttctgtaaatacagactactgcgagtgtccagagctctctgccatgatacttccttgggactgacttggctgagaacgtgttctgtcagaggatttgttagaactctgcccttttgtctgaaactcaaggccaaggagaatgataggagacttaggacagagctgacccttgcaccaggctgggaggctgcagcccttttagatgccacttactgtaagtgg

SEQ ID NO: 1652 - DNA, 495 bp, Homo sapiens
aaaaagtatttttagcacaaaaaagttttctttatatcatactaaattcagagcattacatcattcccagaatacctagtttgaagcttatttttttttccattcacttgcaagctggattaagacattaactataataatatggaatgttcagcatttatgtttggtaaccagatgtatatggtttgtataaccatactttagaatttagttcagataaattggttttggtatactttgactacagaaagtgatttcaacataagatgtgatgaaggaagtctcccatgaaaaacttagtaaggatcaactgatgctatggacaaaacctaaaaaaagagatttgtagatgctttcaaggctttgactatgaaatatagaaaactggatgggcattcttactgaccggatgcttacaatttcaaatgaagaaactactagccactctaaaaattggattagggaaaaaagtgattttagaacagtcttccattt

SEQ ID NO: 1653 - DNA, 543 bp, Homo sapiens
aaaaaaagcatgggaagatttttatttatcaaaatatagaggaaatgtagacaaaatggatataaatgaaaattaccatgttgtaaaaccttgaaaatcagattctaactggatttgtatgcaactaagtatttttctgaacacctatgcaggtcttatttacagtagttactaagggaacacacaaagaattacacaacgttttcctcaagaaaatggtacaaaacacaaccgaggagcgtatacagttgaaaacatttttgttttgattggaaggcagattattttatattagtattaaaaatcaaaccctatgtttctttcagatgaatcttccaaagtggattatattaagcaggtattagatttaggaaaacctttccatttcttaaagtattatcaagtgtcaagatcagcaagtgtccttaagtcaaacaggttttttttgttgttgtttttgctttgtttccttttttagaaagttctagaaaataggaaaacgaaaaatttcattgagatgagtagtgcatttaattatttttt

SEQ ID NO: 1654 - DNA, 461 bp, Homo sapiens
aaatcaaagagaccattccatttcctaacaaacaggtaagttacaaaagtagtccattttacttttcatcagtctttccctgttttgaacaagtttttttgagaattcttagttttagtttttgtttagcttacacactgaaaattttgagaagcatctaaaaaaatccacaattagtgcaaaaagaggggacaatactttaagtcattccttctataaaaagaattaaggttactaaatgccaatttttaagcaaatatatagtttcctatttgccttctgaaagacggcagatataaaaatagttcaatattaggtttaacaaggtttgaacaacacatgtactatcagctttattttacctgcaaaaatattttagctacacttggaaaaaaataaacttgagaatataacttcacatttctaaggccagatgcaagaatacttattcttttcctttt

SEQ ID NO: 1655 - DNA, 600 bp, Homo sapiens
  misc_feature 80, 285, 403, 537, 544, 571: n = A,T,C or G
aaagataaattgtgccactgaggcagtcaatacactaaatttcttatcaaactattactaggggaaaaaaatcagatttnccacacactgtaagcagaaccgaaagagctgcagagaaacttggtttaagaagctgtgtgaagaaaacattaatgacttattgcaattgtaataatccccaggtaaaagatggatgtcaaattaatggactgtaaggaaatacattcaaacttaggtcattaatattacagtgaacataatcaggaagcttgcagaagtatgtancatctctgaattattgaatttgaacaaaggtttccaatagaggtcacactctttttgctctcagacaccattagtgcaaattcagatacaatcatttttacatttgcaggctcaggtncgttcaacagaaggtcaccgagaagtatgggctggttattttagcatgacagaatgcaggcttggaatttctccttgacatggcagaagaaataggaatgatgcccagaggactggaataaattcaaaatgctnggttttncaagttctattttaataaacttcgganaattaacctttccctgaaagacacgtcct

SEQ ID NO: 1656 - DNA, 600 bp, Homo sapiens
aaaaatgaataattatttctgaaattagcaagtcgacatccttttctaaattatgggaatatttaatggtaaaattaaatttattaatctttataaaatccttcctctgatttaagtaataagtaaccaccactgatactgaaagttatctagtgataagaaattgcacatttagtcaaaaaataaatcattaacctgattatacaatgataatgaaaacaaattatttgtctccagaaaccatttgttgaagctgattttggataatgaaaatgtatttctgaatctatatattacagttataagtaatattactagcactatctatgttttttctaagatgtaaacattattttaatatgtctctattcataagatacatttccatctaagcgtgaaacagaatactggaaaggttaaatactcttaaaatatttcagtctaacacccaaaagcatagtgttttgccagtgcaggggaggtatccacaaaatatcaggcacatatctgagagaggcagtctggtctacactgttactcttcatagggtttaacaacatatacaccgtgtttatggtaacactgccccactgatacaag

SEQ ID NO: 1657 - DNA, 224 bp, Homo sapiens
ccatctatacaccattcttaccacacaattgacaaatgatgaactttctgagaaggtgaaaaactatagcaacctccttgctttctgtaggagaattgaacagcactattttgaagatcgtggtaaaggcaggctgtcatagagttatgtgttagtctcaggagtcttaacttttgaaatatgttttacttgaattttacattagatattggtgtcagaatttt

SEQ ID NO: 1658 - DNA, 268 bp, Homo sapiens
aaagtgaacttttttttgtctttggactagaccgtctaaggccacaagattagaagttaccataatacatgttatactgttaatttttagcaaacttcacttttgttgaaaaccttgtaagtttgggatttcaattatccaattctaagttaatttagacttggtatagatggcctttttttctctctgctggtctttccttgcctctgccagatgcttatgctactgttctcttaactactgtagggggaagggggtctaaaaccag

SEQ ID NO: 1659 - DNA, 348 bp, Homo sapiens
aaaaaaagaattatctgtgaaccatacgtgattaataaagatttcctttaaggcagaggctggtcgagatgctgctgttatcttctgcctcagacagacagtataagtggtcttgtttctaagattcctaccaccagttactttgggccaagtatccacatccccttgcgtatgggaggtgggtgaagagtgttggatgcaaagtggttattatgggaagtagctcgatggtaaaaggacaaacacctatctatcttagagcttaagcctgtatgtgcttattcccaagggagatagaggtgtttaatcacaaggacagcatgagttagaggacactggcatcaacag

SEQ ID NO: 1660 - DNA, 253 bp, Homo sapiens
ccaggttgtcccggtcaccaggcaggagttctgtcctttgaactccatagtgacccctttttaccttgttccagatgaggacaggtgtcgggattccgatgacctcacagctcaagtacacctgggcaccagtgacattccagatgtccttggggggcgtcactatggaaggaccttgctcgcaggtgcccttgctgacctgggtgatggccttctccccgcggctctcggccctctggctggcggcgcgcag

SEQ ID NO: 1661 - DNA, 358 bp, Homo sapiens
gttatatatctgtgaataataagagattttataatagcaagaaaatgatgtatattttagtttgttgacaaataagtcatcatgatcacgaaggacactgagaaaaaataatttagaaccctggtttttgtgaatttttttgttttgtgtttctttgttttgagatttgtgtttggtttggtttttgcactgcactaaggcaggagggttggagggctgggtgcagcctgggagtccgatggttttcagcaggagacggggtgtcccctgcagggggctaaactgcaggggcctgagattagctgtgaacatgtgggagcccgatgcatgtgggtcagggatctgggggcccccccag

SEQ ID NO: 1662 - DNA, 451 bp, Homo sapiens
ctgattcttagttgattgatatgtatttgccccagggcactttaatttgggctgtagttattttttttaatacaatagagacttttcatttaactttaactttgtaaatattgaagtgtgtaataaagccaataaaatatgggtttgaatattgttttagcttattatttttgatatgttttggtatcaaattacaaggaattgaaaactaataacttagccctagaagcccattcacttgtaagcaaagtgctaaaacaaagcaaaggtgattgttagtttgagccagtctactcactttgtaagccctttgtactcctgttgtacaagggccatccccatgataaaggttccattctgttatttgagcattgcttattaaaatgatggcactacccagagatggggaaggagaatgtgattatcctagtttatgaatttccaagttttt

SEQ ID NO: 1663 - DNA, 245 bp, Homo sapiens
aaacagacctttagtgactgaggtgtggtttaggacttcaaggttggatggcccaggcgggaaacagagtggagagctcagtaggccgtctgagactgctgctggcggtagccaccgcggcgcatgtagccctcgtttttgcggtagccgtccttctggtctcggaagtagcccccgtaggtgccctgcttgtggtcaaacacccgttcgttgttctccaccaggctgcccagcttctcggccag

SEQ ID NO: 1664 - DNA, 310 bp, Homo sapiens
  misc_feature 22, 32, 33, 115, 121, 149, 222: n = A,T,C or G
agcgtggtcgcgccgaggtttntttttttttnnttgtggaaggttctcaggtctttatttgctctctcacattccaggaattgacttatttaattaatccatcaacctctcatancaaatntttgagaaaacaaatgtatattcagatncttattttcagtagggaagtaagaagttgcaactcagtgcacataaagttgagacagagatggagacatccanccccacctctctggaacaagaaagatgactggggaggaaacacaggtcagcatgggaacaggggtcacagtggacacaagggtgggct

SEQ ID NO: 1665 - DNA, 172 bp, Homo sapiens
aaaaatcaactggaaaaaaaaattaccaaactatattttgaatttgcaaaacatactcacagataccatcatctgagcttttatgaggacataagaaaggaccagcacagagaagataactaacttcggcacgctttgctcgaagggctcttaggaaagaattctgagtttt

SEQ ID NO: 1666 - DNA, 470 bp, Homo sapiens
  misc_feature 164, 386: n = A,T,C or G
tcattaacattttaatgtaatactgaataattctctgtggaatttatcttttacatttttttccttttaagcaaaaagagatttacagtttataatggtaaagactctactacttcagaatcaaagccaaatcaatattacttaataattcagggaaaatttanataaaatcactagacaacggtaaactgatattcttatctactcataaaattatttttgaattgcaaacgaaccgctatgcgtggctaatttaggaagaaaaattttttttttttttttgagactgagtctcgctctgtcaccaggctggaatgcagtggcgtgatcttggctcaatgcaacctccacctcccaggttcaagcgattctctggcctcagcctnttgactagctgggactacaggtgtgtgccaccacatccagctaatttttgtatttttagtagagacggggtttcaccatgttgg

SEQ ID NO: 1667 - DNA, 554 bp, Homo sapiens
  misc_feature 328, 378, 452, 498, 514: n = A,T,C or G
aaataaggaccctctgttgctcattttttgacatttttgaaatccagagtgactctgtttttcttatgcttattaaggttattattactataattatggataataaatttatcatgcctcagatgtttgaaaaccttatagagtcatagttttattctaaccattttcaacaaataatactagatttctttcctcaagaggatgataaatatgggtagggaagatgacttgcactaacacatttatttataaaaatatataaatatttaccttcatacacacacaaaccaccagtgggtaaaatacttcttagatttatctctgaggnggcatacgttaaagctatttatggaagtgtatgtgtttcctatgccccanaaccgtccttcagatacaggtaacccgggaactacatcagcagccttttgaaattgctctcagttcaaagctgnttgttactcaaatttccataagcttcaaacatcttacttccttcangggttttctgggttgntttattttgacttttcccaaagccaaaaaaaaaaaaaaag

SEQ ID NO: 1668 - DNA, 177 bp, Homo sapiens; identical to SEQ ID NO: 1257

SEQ ID NO: 1669 - DNA, 107 bp, Homo sapiens
ggctggtcagtcagtcaacaacatttattgagcacctactatgtgcagagagagcactgtactgggcactgtctggggaatacaaaaaaaaaaaaaaaaaaaaaagg

SEQ ID NO: 1670 - DNA, 602 bp, Homo sapiens
cacagacttgtcttccacaagcacgttcttaccttagccacgaagtgaccaagccacacgtactaaaggttgaactcaaagatatgtacagggtattaaacaaataccaaggggaacagttaacttcaatacaaggtcaaaatcagcaacaagttctacaatccagtgctgatatcagatacaagcttcaaggacaatttcttttcgaaggcttattccagtttcgtgaggctagcatgaggtgtgtgcatttgccaggggcaaatttctattctcaattaacccatgcagcaaatgctacgcatctgctgagtccgtttagaagcatttgcggtggacgatggaggggcccgactcgtcgtactcctgcttgctaatccacatctgctggaaggtggacagtgaggccaggatggagccaccgatccacaccgagtacttgcgctctgggggtgcgatgatcttgatcttcatggtgctgggcgccagggcggtgatctccttctgcatcctgtcggcaatgcccggatacatggtggtgccgcccgacagcaccgtgttggcgtacaggtctttgcggatgtccacgtcacacttcatga

SEQ ID NO: 1671 - DNA, 580 bp, Homo sapiens
ctgatttgttggtaagccgcactagaaaggtatacatagtaatgtatatttatttacatactgaagtcctaaatttatattagaaaaatgtaaataatcgggggtaaacatttttgaagatttattctttttgtgttgctggggtgtatacatttatgtctttgtgaaatacactggtggtgtccttcttacaaaacttttgaaataaaaaaaaactcaaatcttcactgtctgtgaaatccccttcagtcttttcagattgcattgactgtcctcttgatttttcatattacatgtcaaattacttttgctatcataaataagctccaaagtcccccatttaatttttttttaattttgtgtatgatgggtttcagatctggcttttgttaacattttggggcttttttaatcttttcaatctggcgtattgctgtttgaccttttgcaaggtacttaatcaattgctcttttgttatagggtatggatcattgtcagaacttgattggaggggtttctgctccaggttacggatgaggctgctgtgcgcctgtaaattggcatgctggatcagcttgg

SEQ ID NO: 1672 - DNA, 227 bp, Homo sapiens
ccatgagcgggccatgctcaagcggctcctgcggatcgactccaagtgtctgcacttcactcccaaggactggagcaagagggggaagtggtgaccagacactgcccactgcagtgccaagacggcagcaggactggggctgatagcccaccccgcccccactgcagctcccacaaagcactctaagggagatggggctgaggacagctcaaaaaggagaggacagg

SEQ ID NO: 1673 - DNA, 205 bp, Homo sapiens
  misc_feature 76, 132: n = A,T,C or G
aaggtttcttggttcataagggcttcaaagaagcgttgaagttccatccccaaaaggaggctgaaaatcagcacantaagatcctatatcgccagttcaaacaggagttgaaggccaagtaccccaactctncccgacgctgctgagcccttccctcccctaatctgagaagtcagcctcttggctcctcaggccaccatttagg

SEQ ID NO: 1674 - DNA, 577 bp, Homo sapiens
ctgcagaggggatcgtggtgaatttcaatgaaaatccatttgaatcttgaggttcagatcttaaaaaagcaaaggacatgagagaagtaatattgttgcttgaaatttcattgcttatatctaaaagaaactcctatttttaagagaaatgttgaatctttgcaacgtggtagacgctcccacaaaactttctcctgaaataggagataaatgttggaaagaggcaatgtattgagtatgctgatagaggtggagttcagagacaggcaagcatacataagagtcaggatgtttttcagtattatctttacaaatgagtttcttacagtggtcaatgacaaaccaatttcattcaaagcttgcttcaataggcaatggtttgatgccaatatgttagctatttactttgaccaccgtatgcattaaaaagaagaaaaattaagaatactcaagcagaacctccaacttagatagcactttccacaaaaagtaatggagggatagactgaagttaaatgggatcaggtatgtgatgagatctcagaagtgtttgcacaataatgcagatactcatttt

SEQ ID NO: 1675 - DNA, 257 bp, Homo sapiens
ctgggactgaaaccccgcacgcagccgccggagtttccaaactgcgatcccttctcacccaaagaaacaaggggagtatgatccatgatcaacaacatgctaaagttaaacaagaaaatggtacaaaatagaaattattaccatacatgtccagcatgcaggattaatatttttaatgcagattttttgtatttttctatataatcgagcaggcaataaaactgatgagatttgggcgccgagcgtcctaactgagg

SEQ ID NO: 1676 - DNA, 610 bp, Homo sapiens
aaactgtaattgtattgccgtactgtgggctggaaatcccaaatctagattccagcagagttggttctttctgaggtctgcaaggaagggctctgttccatgcctctctccttggcttgtagaaggcatcttgtctctatgactcttcacattgtctttatgtacatctctgtgcccaagttttccctttttattaagacaccagtcatactggctcagggcccaccgctaatgccttaatgaaatcattttaacattatattctctacaaagaccttatttccaaataagataatatttggaggtattgggaataaaaactccaacatataaatttgaggaaggcacgatttcactcataacaatcttaccctttcttgcaagagatgcttgtacattattttcctaataccttggtttcactagtagtaaacattattattttttttatatttgcaaaggaaacatatctaatccttcctatagaaagaacagtattgctgtaattccttttcttttcttcctcatttcctctgccccttaaaagattgaagaaagagaaacttgtcaactcatatccatgttatctagcaaagtacataagaatcta

SEQ ID NO: 1677 - DNA, 605 bp, Homo sapiens
ctgactcatgtgaaaaaggcactatgaaaattaatgaatctagataatttctctaaatgatttatgttaaaatatacaacattcttacataacatctgttttatatatgtgaaataatataacatttaatgacaaaaattgtgttcccaaaaataacatttgttgaaggttaggtatctttcttttctctatgtggaatctttcacaggattaaaatatgtgtaaattaagtgcttcttattaccagaaatacttgacacagataaacacataaaatggccccacttccttttaactactcatatcaacattcagaactgaggctttcattaagcaaaatactgtaatgcacaccaatgcagactacttcctttgctagattttgagaagacatgacctctttcgcatttgtgctttctcatatataagaacacagtatacataataagcagaatataaactaaatcaaaatacaagctatacaaggagttgcaaccaacagagccatgacaaactgtcttgagaatgctccatagatttatatttgcatgtccaaggtatggctgtactttacagttcattcaaatgttttaatttttttttac

SEQ ID NO: 1678 - DNA, 502 bp, Homo sapiens
  misc_feature 468, 492: n = A,T,C or G
aaaagcacacagctcaaagtcagccaataagtcttttcctatttgtgacttttactaataaaaataaatctgcctgtaaattatcttgaagtcctttacctggaacaagcactctctttttcaccacatagttttaacttgactttcaagataattttcagggtttttgttgttgttgttttttgtttgtttgttttggtgggagaggggagggatgcctgggaagtggttaacaacttttttcaagtcactttactaaacaaacttttgtaaatagaccttaccttctattttcgagtttcatttatattttgcagtgtagccagcctcatcaaagagctgacttactcatttgacttttgcactgactgtattatctgggtatctgctgtgtctgcacttcatggtaaacgggatctaaaatgcctggtggcttttcacaaaaagcagattttcttcatgtactgngatgtctgatgcaatgcatcctanaacaaactgg

SEQ ID NO: 1679 - DNA, 334 bp, Homo sapiens
gtcaaatttcctgaattgctatgtgtctgggtttcatccatccgacattgaagttgacttactgaagaatggagagagaattgaaaaagtggagcattcagacttgtctttcagcaaggactggtctttctatctcttgtactacactgaattcacccccactgaaaaagatgagtatgcctgccgtgtgaaccatgtgactttgtcacagcccaagatagttaagtgggatcgagacatgtaagcagcatcatggaggtttgaagatgccgcatttggattggatgaattccaaattctgcttgcttgctttttaatattgatatgcttatac

SEQ ID NO: 1680 - DNA, 533 bp, Homo sapiens
gtgggattcacaggggcctgagtagggcccggggaagcagagccctaagggattaaggctcagacacctctgagagcaggtgggcactggctgggtacggtgccctccacaggactctccctactgcctgagcaaacctgaggccaacatggtgaaaccccgtctctaccaaaatacaaaaaattagccaggcgtgacggtgcgtgcctgtagtcccaactactcggaaggctgaggcaggagaattgcttgaacccgggaggcagaggttgcagtgagccgagatcgcaccactgcactccagcttggcaatagagtgagactccatctcaaaaaacaaaacaaaacaacaacaaaataaactactgtggcagcgttggtaccctgcatcactgccatggttgtgctattctcatctcaacatagaattggtgggttctcctaagggtgtcaggaacctctaaaaagatgtgattctttgggaggggatatttgaaattccaacttccattccccctagcaaaaggaagcag

SEQ ID NO: 1681 - DNA, 484 bp, Homo sapiens
ccaagaccccaggcagaggcagaacttctgcagccagaacccggcttggatgcccactttgtagcttctccttctccattctcagtcagaccccctgggatgaaggggagggcaggggtggaggcaccttgaggccaagccagcaggtgggggtgctgcttgctcactcttgcatccctagctaggtcagcaccagctcctctgggccccaggacagtctgtggagcctgctcctcacctgtcctgggagcctagggtaccaagggtaccgaggaagccatgggtagtggggacaccatgggtactgagggtactgagggtcctgagggcttgaaggtggggtcctcagggatgtagacagtgctgttcccttcaggcatctcccagtagaccgcatcctcaaagcagttctcatctgaaggttgtccccagaatggtaatctcaaaatgagccccacaatgatgccacccatcagggccatgg

SEQ ID NO: 1682 - DNA, 608 bp, Homo sapiens
aaaaatgtcattactttcaaaggaacagaagtagttaaccaaactaacaagcaaaacctgaggtttacctagtgacaccaaattatcggtattttaactgaatttacccattgactaagaatgaaccggatttggtggtggttttgtttctatgcaaactggacacaaattacaacagtaaatttttttataagtgcttctcccttctccatgatgtgacttccggagataaaggattcaaaagataaagacaaagtacgctcagagttgttaaccagaaagtcctggctgtggttgcagaaacactgttggaagaaaagagatgactaagtcaagtgtctgccttatcaaaagagcaaaaatgcctctggttttgtgtttgggagaaaaatatcttggacgcactgctttccttgataaaagtcatcttctctactgtgtgaaatgaatacttggaattctaattgttttgtgtgccaggggcagtaatgtccctgcctcttctcccaatcaaggttgaggagtggggctggggagaggacttaactgacttaagaagtaggaaaacaaaaacctctctcctcagccttccacctccaagagaggag

SEQ ID NO: 1683 - DNA, 554 bp, Homo sapiens
  misc_feature 538: n = A,T,C or G
ctgaggctgatcacacagctcatgaagagatggaagctcatacgactgtgaaagaagctgaggatgacaacatctcggtcacaatccaggctgaagatgccatcactctggattttgatggtgatgaccttctagaaacaggtaaaaatgtgaaaattacagattctgaagcaagtaagccaaaagatgggcaggacgccattgcacagagcccggagaaggaaagcaaggattatgagatgaatgcgaaccataaagatggtaagaaggaagactgcgtgaagggtgaccctgtcgagaaggaagccagagaaagttctaagaaagcagaatctggagacaaagaaaaggatactttgaagaaagggccctcgtctactggggcctctggtcaagcaaagagctcttcaaaggaatctaaagacagcaagacatcatctaaagatgacaaaggaagtacaagtagtgctagtggtagcagtggaagctcaactaaaaatatctgggttagtggactttcatctaataccaaagctgntgatttgaagaacctc

SEQ ID NO: 1684 - DNA, 437 bp, Homo sapiens
cctccgtggcagcagaagatcttttcgtccactatggccgcgatgggcaggcagttgaagcagtcagtgaaggttttccacagtttgatgttgtagcgtctcttgcactcatcgtagaaaccatagatgcggttgatgctggcacactcgtggttcccacggagcaggaagaagttctcggggtacttgatcttataggccagcagcaggcagatggtctccaaggactgcttgcccctgtccacatagtcccccagaaagaggtagttgctctcgggagggaaaccgccatactcaaatagtcgcagaaggtcgtagtactggccgtgtatgtcaccgcagatcttgaggggtgcctccagctccagaagaatgggctggctcagaaaaatctcccgggatttcaggcacagaccgcggatctcgttctctgtcag

SEQ ID NO: 1685 - DNA, 356 bp, Homo sapiens
caggtgcatggctaacgcgggatcaaacactaatggatcccagtttttcataacggtagtaccaacgccttggcttgataataagcatacagtatttggacgagtgactaaaggaatggaagttgtacagaggatctccaacgtcaaagtcaatcccaaaacagataagccctatgaggatgtcagcatcataaatattactgtcaagtaaaataagatttgttttaatgtacttgcaaataaaaatacaatattaaacagattattttacattaggaagcttaggacttgctgaatatacagatcatgtttcaaagatacagtatttttgtattttttattaaaggctatttttt

SEQ ID NO: 1686 - DNA, 289 bp, Homo sapiens
gaaaaagaagcattacagttaatggcaacataccttcccaaggatacttctccaggatcagcctatcaggaaggtggaggtctctatgcactaggtcttattcatgccaatcatggtggtgatataattgactatctgcttaatcagcttaagaacgccagcaatgatatcgttagacacggtggcagtctgggccttggtttggcagccatgggaactgcatgtcaagatgtttatgatttgctaaaaacaaacctttatcaggatgatgcagtaacaggggaagcag

SEQ ID NO: 1687 - DNA, 549 bp, Homo sapiens
aaaatcgtttaagtgaccagttagatactcattcagagcagactcgggcggatagatagggaatactgtatgggtatatctttgtgtctagactttttgagatcgccctgaaggactgtttttgttttgttttgtttgcttggcatagccccttcaaggaatttaatctctcggccatattcttgtctgattttacggaggttgatgtcgctactgtgttaaataaccagtactttggttttcattcccttactaagtactttaaggtcttatatgtcataattttattgctaacatcaaatatttattttattttttagaaaaataactaaacatgggcaaaggagatcctaagaagccgagaggcaaaatgtcatcatatgcattttttgtgcaaacttgtcgggaggagcataagaagaagcacccagatgcttcagtcaacttctcagagttttctaagaagtgctcagagaggtggaagaccatgtctgctaaagagaaaggaaaatttgaagatatggcaaaagcggacaaggtccgttatga

SEQ ID NO: 1688 - DNA, 350 bp, Homo sapiens
cctggcaccaggctgcctgtctttggttttacttccttgtcactttttcttaaaagaggtactgagtataaaacaatataaaacaatatgagagggtctctctctcttccctcatttcccccctttgagactctcagtttttattagtgggagttctgagtcttatttttgctacttatgtctttttgtgcaatagattgatagtgatttatatagtatgcttctgctaaagcattttggtgaactaaggtcgtgacaaagttttttatcatttggagaaatacaggtatcagacaaaggagcagtaagcaggtttctattactattattactcttattataagagtttt

SEQ ID NO: 1689 - DNA, 231 bp, Homo sapiens
cgctcctgtctctaaagaggggaaagggcaaggatggtggaggctttctgtgctacctggaagctgaccaacagtcagaactttgatgagtacatgaaggctctaggcgtgggctttgccactaggcaggtgggaaatgtgaccaaaccaacggtaattatcagtcaagaaggagacaaagtggtcatcaggactctcagcacattcaagaacacggagattagtttccag

SEQ ID NO: 1690 - DNA, 425 bp, Homo sapiens
tctttcctacagggagctcagtaacctggacggctctaaggctggaatgaccacataggtaggtatggtgagttcaaccacttttgctcttgaattgatgcccttcgatgtatgccatttagtgaaagtgctaagtcttaagtttcctaccactttggtttcatatttttggacttaacaaagttgtgaatagcacagtcgaggaaaattgatacctgcagtaacccataggaaataaactgtagagttccatattctggtattgtgattatattgttttatattaaaaaagaaaagaaaagaattttttttaattttatttttccccgtcttgcaaagtatagtgacccctgtttccattaaatttgaataaagactatttttgcttgaaaaaaaaaaaaaaaaaaaaaaaaaaaaaaaaaaaa

SEQ ID NO: 1691 - DNA, 134 bp, Homo sapiens
ctggcccgggccctggcctggttctcaagtgtttcctagacagagaggcacctgggtcagtattagtctatttatcagaggtgtaaataatctatgtatagtttttctccttttagattattttgtatttgttt

SEQ ID NO: 1692 - DNA, 374 bp, Homo sapiens
  misc_feature 119, 120, 145: n = A,T,C or G
ccatattgttcccagtgtccagcagtatggaatggttcaggagctgtaagtgctcgccagaaacccagagctaattatttagaagaccgaaaaaatgggtcaaagctgattgtttttgnnattggagggatcacatactctgaantgcgttgtgcttatgaagtttctcaggcacataaatcctgtgaagttattattggttctacacatgttttaacacccaaaaagctgttggatgatataaagatgctgaataaacccaaggataaagtctccttaattaaagatgaatagcatttctttttggagggtttagagattcttactaatatgttgaactaaaatagaaagaaaatgttgctgtcacgtaattt

SEQ ID NO: 1693 - DNA, 776 bp, Homo sapiens
ggcaattagaccagaagatccccgctcctgtctctaaagaggggaaagggcaaggatggtggaggctttctgtgctacctggaagctgaccaacagtcagaactttgatgagtacatgaaggctctaggcgtgggctttgccactaggcaggtgggaaatgtgaccaaaccaacggtaattatcagtcaagaaggagacaaagtggtcatcaggactctcagcacattcaagaacacggagattagtttccagctgggagaagagtttgatgaaaccactgcagatgatagaaactgtaagtctgttgttagcctggatggagacaaacttgttcacatacagaaatgggatggcaaagaaacaaattttgtaagagaaattaaggatggcaaaatggttatgacccttacttttggtgatgtggttgctgttcgccactatgagaaggcataaaaatgttcctggtcggggcttggaagagctcttcagtttttctgtttcctcaagtctcagtgctatcctattacaacatggctgatcattaattagaaggttatccttggtgtggaggtggaaaatggtgatttaaaaacttgttactccaagcaacttgcccaattttaatctgaaaatttatcatgttttataatttgaattaaagttttgtccccccccccttttttttataaacaagtgaatacattttataatttcttttggaatgtaaatcaaatttgaataaaaatcttacacgtgaaaaaaaaaaaaaaaaaaa

SEQ ID NO: 1694 - DNA, 2499 bp, Homo sapiens
agatgcgagcactgcggctgggcgctgaggatcagccgcttcctgcctggattccacagcttcgcgccgtgtactgtcgccccatccctgcgcgcccagcctgccaagcagcgtgccccggttgcaggcgtcatgcagcgggcgcgacccacgctctgggccgctgcgctgactctgctggtgctgctccgcgggccgccggtggcgcgggctggcgcgagctcggggggcttgggtcccgtggtgcgctgcgagccgtgcgacgcgcgtgcactggcccagtgcgcgcctccgcccgccgtgtgcgcggagctggtgcgcgagccgggctgcggctgctgcctgacgtgcgcactgagcgagggccagccgtgcggcatctacaccgagcgctgtggctccggccttcgctgccagccgtcgcccgacgaggcgcgaccgctgcaggcgctgctggacggccgcgggctctgcgtcaacgctagtgccgtcagccgcctgcgcgcctacctgctgccagcgccgccagctccaggaaatgctagtgagtcggaggaagaccgcagcgccggcagtgtggagagcccgtccgtctccagcacgcaccgggtgtctgatcccaagttccaccccctccattcaaagataatcatcatcaagaaagggcatgctaaagacagccagcgctacaaagttgactacgagtctcagagcacagatacccagaacttctcctccgagtccaagcgggagacagaatatggtccctgccgtagagaaatggaagacacactgaatcacctgaagttcctcaatgtgctgagtcccaggggtgtacacattcccaactgtgacaagaagggattttataagaaaaagcagtgtcgcccttccaaaggcaggaagcggggcttctgctggtgtgtggataagtatgggcagcctctcccaggctacaccaccaaggggaaggaggacgtgcactgctacagcatgcagagcaagtagacgcctgccgcaaggttaatgtggagctcaaatatgccttattttctacaaaagactgccaaggacatgaccagcagctggctacagcctcgatttatatttctgtttgtggtgaactgattttttttaaaccaaagtttagaaagaggtttttgaaatgcctatggtttctttgaatggtaaacttgagcatcttttcactttccagtagtcagcaaagagcagtttgaattttcttgtcgcttcctatcaaaatatctagagactcgagcacagcacccagacttcatgcgcccgtggaatgctcaccacatgttggtcgaagcggccgaccactgactttgtgacttaggcggctgtgttgcctatgtagagaacacgcttcacccccactccctgtacagtgcgcacaggctttatcgagaataggaaaacctttaaaccccggtcatccggacatcccaacgcatgctcctggagctcacagccttctgtggtgtcatttctgaaacaagggcgtggatccctcaacccagaagagtgtttatgtcttcaagtgacctgtactgcttggggactatttgagaaaataaggtggagtcctacttgtttcacaaatatgtatctaagaatgttctagggcactctgggaacctataaaggcaggtatttcgggccctcctcttcaggaatcttcctgaagacatggcccagtcgaaggcccaggatggcttttgctgcggccccgtggggtaggagggacagagagacagggagagtcagcctccacattcagaggcatcacaagtaatggcacaattcttcggatgactgcagaaaatagtgttttgtagttcaacaactcaagacgaagcttatttctgaggataagctctttaaagacaaagctttattttcatctctcatcttttgtcctccttagcacaatgcaaaaaagaatagtaatatcagaacaggaaggaggaatggcttgctggggagcccatccaggacactgggagcacatagagattcacccatgtttgttgaacttagagtcattctcatgcttttctttataattcacacatatatgcagagaagatatgttcttgttaacattgtatacaacatagccccaaatatagtaagatctatactagataatcctagatgaaatgttagagatgctatatgatacaactgtggccatgactgaggaaaggagctcacgcccagagactgggctgctctcccggaggccaaacccaagaaggtctggcaaagtcaggctcagggagactctgccctgctgcagacctcggtgtggacacacgctgcatagagctctccttgaaaacagaggggtctcaagacattctgcctacctattagcttttctttatttttttaactttttggggggaaaagtatttttgagaagtttgtcttgcaatgtatttataaatagtaaataaagtttttaccatt

SEQ ID NO: 1695 - DNA, 1519 bp, Homo sapiens
gtcagccgcatggctcccctgtgccccagcccctggctccctctgttgatcccggcccctgctccaggcctcactgtgcaactgctgctgtcactgctgcttctgatgcctgtccatccccagaggttgccccggatgcaggaggattcccccttgggaggaggctcttctggggaagatgacccactgggcgaggaggatctgcccagtgaagaggattcacccagagaggaggatccacccggagaggaggatctacctggagaggaggatctacctggagaggaggatctacctgaagttaagcctaaatcagaagaagagggctccctgaagttagaggatctacctactgttgaggctcctggagatcctcaagaaccccagaataatgcccacagggacaaagaaggggatgaccagagtcattggcgctatggaggcgacccgccctggccccgggtgtccccagcctgcgcgggccgcttccagtccccggtggatatccgcccccagctcgccgccttctgcccggccctgcgccccctggaactcctgggcttccagctcccgccgctcccagaactgcgcctgcgcaacaatggccacagtgtgcaactgaccctgcctcctgggctagagatggctctgggtcccgggcgggagtaccgggctctgcagctgcatctgcactggggggctgcaggtcgtccgggctcggagcacactgtggaaggccaccgtttccctgccgagatccacgtggttcacctcagcaccgcctttgccagagttgacgaggccttggggcgcccgggaggcctggccgtgttggccgcctttctggaggagggcccggaagaaaacagtgcctatgagcagttgctgtctcgcttggaagaaatcgctgaggaaggctcagagactcaggtcccaggactggacatatctgcactcctgccctctgacttcagccgctacttccaatatgaggggtctctgactacaccgccctgtgcccagggtgtcatctggactgtgtttaaccagacagtgatgctgagtgctaagcagctccacaccctctctgacaccctgtggggacctggtgactctcggctacagctgaacttccgagcgacgcagcctttgaatgggcgagtgattgaggcctccttccctgctggagtggacagcagtcctcgggctgctgagccagtccagctgaattcctgcctggctgctggtgacatcctagccctggtttttggcctcctttttgctgtcaccagcgtcgcgttccttgtgcagatgagaaggcagcacagaaggggaaccaaagggggtgtgagctaccgcccagcagaggtagccgagactggagcctagaggctggatcttggagaatgtgagaagccagccagaggcatctgagggggagccggtaactgtcctgtcctgctcattatgccacttccttttaactgcaaagaaattttttaaaataaatatttataat

SEQ ID NO: 1696 - DNA, 4895 bp, Homo sapiens
catccccatcagtgcagcatccggttccacccctgctttcaatccaggcaagccctgggtggccggatgtgatgccactgacttgtgaattgagggttagagagaagtgagtttctgggtctgaagggtggcttgagatcggcagagggaaggtggcccaggctttgtgaagaggcaaagtgagactctgagggaggattcaggaaacccctatccctgatagagggtcccagccctggactaccccgcggaggctgacttctcagactgggctgctccccacctccgcccccttcgcaacgcgtttgtttaagccacaggggactctggagtcagaggttggtgtgatcagggaagggctggttaggagaggcatggcccaggccctgccaggaatcaaagtcagaaacctgagagggaactgaggtcccccaagatcctagtctaacccccactcccacaaatccgctgccatttcgctgctccatttcccattccttgccctccaccctcaccaggcagaatccagttccccttctgctatcaatccagggaaaccccaggcttggtgctgggatgttttttgggggtcagagaatcaagggcatagtcctgaggggccagttgagatcggctgaggggagcgggcccaagctctgtggcgaggcaaggtgagactctgaggaaggactgaggaggcccccacccaagatagaggaacccaaataatccagcccacgtcctgctgccagtcctggaccacccgggggaagacttctcaggctaggccatcccagctcccactgccactaaagctacaggggactctagagtcaagagcttggtgtgcccaaggcagggccaggctctgcctggcatcggggtcaggaccttgagagggaactgagggcgctacacccccaccccatccgcattccaacatgcccagccccatccccaactccgttttgcagaatccattttttcccctgcagtcaaccccgggaagacctgggaatggtcaggcactcggatcttgacatccacatcgagggctgaaggagggagagagtttggtatcatgagcagagcctcagggtagcagagggaggaccctggccctcctgggagatgaggaaggcctcaggagacccagcaccccaaggcagggagcccaccccacccctgtctgagaatgaggtgcctcctcctttagcctcaggaatccaagggatggcaactcaggtcagcagaggggtgggttccaagcccttccaggatcaaggaaaggaagacgagggaggattcagggggccttgcattccagatcagtggagacctgggccctgggaggtcctgggcaaggtagccacctgtagctcatacttcctgcatcttcgaggtcacagagaggagagggctatggtctgaggggtggtacttcaggtccgcagagggaggagtcccaggatctacaggacccaaggtgtgccacacttcacgaggaatggggatacctgtggctcagaaagacgggaccccacagagtctggctgtcccctgttcttagctcaggggggaccagaggagggatggccctatgtgccaatttcacttgttccacaggcaggaagttggggaaccttcagggagatgaggttttggagtaaaggggcaatgtttgctcatctcagggggttgggggttgaggaagggcaggccctgtcaggagcaaacatgagtacccacaggaggccatcagaaccctcaccccagaaccaaaggggtcagccctgggcaccccacacaggggtgacaggatgtggctccttctcatttctgattccagatctcagtgaggtgaggaccttgttctcagagggtgactcaggtcaccacagggacccccatctggtctacagacacagtggtcccaggatctgccaagagtcctggtgaggaatgtgagggaggattgagggtaccacagggccagaacgcagatgatgaccccacagaaatcagccctgctcctgttgtcaccccagagagcatgggcttggctttctgctgaggtccctctcttatcctgggatcactggtgtcacggagggggaggccttggtctgagggggctgcacccaggtcagtagagggagggtcccaggctctgccaggagttgaggtgaggaccaagcaggctccgcatccaggacacatgggttccaatgaatttcgacatcttttgctgtcgttcttcggaagacctaggcacaggtggccagatgtggggtttcttaggtcctgttccctctcaggcatgtgagctcttgatctgagtttctcaggccagcaaaagagtgggatccaggccctgcctggagaaatgtgagggccctgagtgaacacagtggggatcatccactccatgagagtggggacctcacagagtccagcctaccctcttgatggcactgagggaccggggctgtgcttacagtctgcaccctaagggcccatggattcctctcctaggagctccaggaacaaggcagtgaggccttggtctgagacagtgtcctcaggttacagagcagaggatgcacaggctgtgccagcagtgaatgtttgccctgaatgcacaccaagggccccacctgccacaagacacataggactccaaagagtctggcctcacctccctaccatcaatcctgcagaatcgacctctgctggccggctataccctgaggtgctctctcacttcctccttcaggttctgagcagacaggccaaccggaggacaggattccctggaggccacagaggagcaccaaggagaagatctgtaagtaagcctttgttagagcctctaagatttggttctcagctgaggtctctcacatgctccctctctccgtaggcctgtgggtccccattgcccagcttttgcctgcactcttgcctgctgccctgagcagagtcatcatgtcttctgagcagaagagtcagcactgcaagcctgaggaaggcgttgaggcccaagaagaggccctgggcctggtgggtgcgcaggctcctactactgaggagcaggaggctgctgtctcctcctcctctcctctggtccctggcaccctggaggaagtgcctgctgctgagtcagcaggtcctccccagagtcctcagggagcctctgccttacccactaccatcagcttcacttgctggaggcaacccaatgagggttccagcagccaagaagaggaggggccaagcacctcgcctgacgcagagtccttgttccgagaagcactcagtaacaaggtggatgagttggctcattttctgctccgcaagtatcgagccaaggagctggtcacaaaggcagaaatgctggagagagtcatcaaaaattacaagcgctgctttcctgtgatcttcggcaaagcctccgagtccctgaagatgatctttggcattgacgtgaaggaagtggaccccaccagcaacacctacacccttgtcacctgcctgggcctttcctatgatggcctgctgggtaataatcagatctttcccaagacaggccttctgataatcgtcctgggcacaattgcaatggagggcgacagcgcctctgaggaggaaatctgggaggagctgggtgtgatgggggtgtatgatgggagggagcacactgtctatggggagcccaggaaactgctcacccaagattgggtgcaggaaaactacctggagtaccggcaggtacccggcagtaatcctgcgcgctatgagttcctgtggggtccaagggctctggctgaaaccagctatgtgaaagtcctggagcatgtggtcagggtcaatgcaagagttcgcattgcctacccatccctgcgtgaagcagctttgttagaggaggaagagggagtctgagcatgagttgcagccagggctgtggggaaggggcagggctgggccagtgcatctaacagccctgtgcagcagcttcccttgcctcgtgtaacatgaggcccattcttcactctgtttgaagaaaatagtcagtgttcttagtagtgggtttctattttgttggatgacttggagatttatctctgtttccttttacaattgttgaaatgttccttttaatggatggttgaattaacttcagcatccaagtttatgaatcgtagttaacgtatattgctgttaatatagtttaggagtaagagtcttgttttttattcagattgggaaatccgttctattttgtgaatttgggacataataacagcagtggagtaagtatttagaagtgtgaattcaccgtgaaataggtgagataaattaaaagatacttaattcccgccttatgcctcagtctattctgtaaaatttaaaaatatatatgcatacctggatttccttggcttcgtgaatgtaagagaaattaaatctgaataaataattctttctgttaactggctcatttcttctctatgcactgagcatctgctctgtggaaggcccaggattagtagtggagatactagggtaagccagacacacacctaccgatagggtattaagagtctaggagcgcggtcatataattaaggtgacaagatgtcctctaagatgtaggggaaaagtaacgagtgtgggtatggggctccaggtgagagtggtcgggtgtaaattccctgtgtggggccttttgggctttgggaaactccattttcttctgagggatctgattctaatgaagcttggtgggtccagggccagattctcagagggagagggaaaagcccagattggaaaagttgctctgagcggttcctttgtgacaatggatgaacagagaggagcctctacctggg

SEQ ID NO: 1697 - DNA, 1970 bp, Homo sapiens
atattggagtagcaagaggctgggaagccatcacttaccttgcactgagaaagaagacaaaggccagtatgcacagctttcctccactgctgctgctgctgttctggggtgtggtgtctcacagcttcccagcgactctagaaacacaagagcaagatgtggacttagtccagaaatacctggaaaaatactacaacctgaagaatgatgggaggcaagttgaaaagcggagaaatagtggcccagtggttgaaaaattgaagcaaatgcaggaattctttgggctgaaagtgactgggaaaccagatgctgaaaccctgaaggtgatgaagcagcccagatgtggagtgcctgatgtggctcagtttgtcctcactgaggggaaccctcgctgggagcaaacacatctgacctacaggattgaaaattacacgccagatttgccaagagcagatgtggaccatgccattgagaaagccttccaactctggagtaatgtcacacctctgacattcaccaaggtctctgagggtcaagcagacatcatgatatcttttgtcaggggagatcatcgggacaactctccttttgatggacctggaggaaatcttgctcatgcttttcaaccaggcccaggtattggaggggatgctcattttgatgaagatgaaaggtggaccaacaatttcagagagtacaacttacatcgtgttgcggctcatgaactcggccattctcttggactctcccattctactgatatcggggctttgatgtaccctagctacaccttcagtggtgatgttcagctagctcaggatgacattgatggcatccaagccatatatggacgttcccaaaatcctgtccagcccatcggcccacaaaccccaaaagcatgtgacagtaagctaacctttgatgctataactacgattcggggagaagtgatgttctttaaagacagattctacatgcgcacaaatcccttctacccggaagttgagctcaatttcatttctgttttctggccacaactgccaaatgggcttgaagctgcttacgaatttgccgacagagatgaagtccggtttttcaaagggaataagtactgggctgttcagggacagaatgtgctacacggataccccaaggacatctacagctcctttggcttccctagaactgtgaagcatatcgatgctgctctttctgaggaaaacactggaaaaacctacttctttgttgctaacaaatactggaggtatgatgaatataaacgatctatggatccaggttatcccaaaatgatagcacatgactttcctggaattggccacaaagttgatgcagttttcatgaaagatggatttttctatttctttcatggaacaagacaatacaaatttgatcctaaaacgaagagaattttgactctccagaaagctaatagctggttcaactgcaggaaaaattgaacattactaatttgaatggaaaacacatggtgtgagtccaaagaaggtgttttcctgaagaactgtctattttctcagtcatttttaacctctagagtcactgatacacagaatataatcttatttatacctcagtttgcatatttttttactatttagaatgtagccctttttgtactgatataatttagttccacaaatggtgggtacaaaaagtcaagtttgtggcttatggattcatataggccagagttgcaaagatcttttccagagtatgcaactctgacgttgatcccagagagcagcttcagtgacaaacatatcctttcaagacagaaagagacaggagacatgagtctttgccggaggaaaagcagctcaagaacacatgtgcagtcactggtgtcaccctggataggcaagggataactcttctaacacaaaataagtgttttatgtttggaataaagtcaaccttgtttctactgtttt

SEQ ID NO: 1698 - DNA, 2480 bp, Homo sapiens
tttgcttcccctcttcccgaagctctgacacctgccccaacaagcaatgttggaaaattatttacatagtggcgcaaactcccttactgctttggatataaatccaggcaggaggaggtagctctaaggcaagagatctgggacttctagcccctgaactttcagccgaatacatcttttccaaaggagtgaattcaggcccttgtatcactggcagcaggacgtgaccatggagaagctgttgtgtttcttggtcttgaccagcctctctcatgcttttggccagacaggtaagggccaccccaggctatgggagagttttgatctgaggtatgggggtggggtctaagactgcatgaacagtctcaaaaaaaaaaaaaaaagactgtatgaacagaacagtggagcatccttcatggtgtgtgtgtgtgtgtgtgtgtgtgtgtgtggtgtgtaactggagaaggggtcagtctgtttctcaatcttaaattctatacgtaagtgaggggatagatctgtgtgatctgagaaacctctcacatttgcttgtttttctggctcacagacatgtcgaggaaggcttttgtgtttcccaaagagtcggatacttcctatgtatccctcaaagcaccgttaacgaagcctctcaaagccttcactgtgtgcctccacttctacacggaactgtcctcgacccgtgggtacagtattttctcgtatgccaccaagagacaagacaatgagattctcatattttggtctaaggatataggatacagttttacagtgggtgggtctgaaatattattcgaggttcctgaagtcacagtagctccagtacacatttgtacaagctgggagtccgcctcagggatcgtggagttctgggtagatgggaagcccagggtgaggaagagtctgaagaagggatacactgtgggggcagaagcaagcatcatcttggggcaggagcaggattccttcggtgggaactttgaaggaagccagtccctggtgggagacattggaaatgtgaacatgtgggactttgtgctgtcaccagatgagattaacaccatctatcttggcgggcccttcagtcctaatgtcctgaactggcgggcactgaagtatgaagtgcaaggcgaagtgttcaccaaaccccagctgtggccctgaggccagctgtgggtcctgaaggtacctcccggttttttacaccgcatgggccccacgtctctgtctctggtacctcccgcttttttacactgcatggttcccacgtctctgtctctgggcctttgttcccctatatgcattgaggcctgctccaccctcctcagcgcctgagaatggaggtaaagtgtctggtctgggagctcgttaactatgctgggaaatggtccaaaagaatcagaatttgaggtgttttgttttcatttttatttcaagttggacagatcttggagataatttcttacctcacatagatgagaaaactaacacccagaaaggagaaatgatgttataaaaaactcataaggcaagagctgagaaggaagcgctgatcttctatttaattccccacccatgacccccagaaagcaggagcattgcccacattcacagggctcttcagtctcagaatcaggacactggccaggtgtctggtttgggtccagagtgctcatcatcatgtcatagaactgctgggcccaggtctcctgaaatgggaagcccagcaataccacgcagtccctccactttctcaaagcacactggaaaggccattagaattgccccagcagagcagatctgctttttttccagagcaaaatgaagcactaggtataaatatgttgttactgccaagaacttaaatgactggtttttgtttgcttgcagtgctttcttaattttatggctcttctgggaaactcctccccttttccacacgaaccttgtggggctgtgaattctttcttcatccccgcattcccaatatacccaggccacaagagtggacgtgaaccacagggtgtcctgtcagaggagcccatctcccatctccccagctccctatctggaggatagttggatagttacgtgttcctagcaggaccaactacagtcttcccaaggattgagttatggactttgggagtgagacatcttcttgctgctggatttccaagctgagaggacgtgaacctgggaccaccagtagccatcttgtttgccacatggagagagactgtgaggacagaagccaaactggaagtggaggagccaagggattgacaaacaacagagccttgaccacgtggagtctctgaatcagccttgtctggaaccagatctacacctggactgcccaggtctataagccaataaagcccctgtttacttgagtgagtccaagctgttttctgatagttgctttagaagttgtgactaacttctctatgacctttgaa

SEQ ID NO: 1699 - DNA, 449 bp, Homo sapiens
tggccaccatggagaacaaggtgatctgcgcccttgtcctggtgtccatgctggccctcggcaccctggccgaggcccagacagagacgtgtacagtggccccccgtgaaagacagaattgtggttttcctggtgtcacgccctcccagtgtgcaaataagggctgctgtttcgacgacaccgttcgtggggtcccctggtgcttctatcctaataccatcgacgtccctccagaagaggagtgtgaattttagacacttctgcagggatctgcctgcatcctgacgcggtgccgtccccagcacggtgattagtcccagagctcggctgccacctccaccggacacctcagacacgcttctgcagctgtgcctcggctcacaacacagattgactgctctgactttgactactcaaaattggcctaaaaattaaaagagatcgatatt

SEQ ID NO: 1700 - DNA, 2861 bp, Homo sapiens
tcgagcggccgcccgggcaggtcggcctctcatttctcctagcccttctgttcttccttggccaagctgcaggggatttgggggatgtgggacctccaattcccagccccggcttcagctctttcccaggtgttgactccagctccagcttcagctccagctccaggtcgggctccagctccagccgcagcttaggcagcggaggttctgtgtcccagttgttttccaatttcaccggctccgtggatgaccgtgggacctgccagtgctctgtttccctgccagacaccacctttcccgtggacagagtggaacgcttggaattcacagctcatgttctttctcagaagtttgagaaagaactttccaaagtgagggaatatgtccaattaattagtttgtatgaaaagaaactgttaaacctaactgtccgaattgacatcatgggagaaggatacatttcttacactgaactggacttcgagctgataaggtagaagtgaaggagatggaaaaactggtcatacagctgaaggagagttttggtggaagctcagaaattgttgaccagctggaggtggagataagaaatatgactctcttggtagagaagcttgagacactagacaaaaacaatgtccttgccattcgccgagaaatcgtggctctgaagaccaagctgaaagagtgtgaggcctctaaagatcaaaacacccctgtcgtccaccctcctcccactccagggagctgtggtcatggtggtgtggtgaacatcagcaaaccgtctgtggttcagctcaactggagagggttttcttatctatatggtgcttggggtagggattactctccccagcatccaaacaaaggactgtattgggtggcgccattgaatacagatgggagactgttggagtattatatactgtacaacacactggatgatttgctattgtatataaatgctcgagagttgcggatcacctatggccaaggtagtggtacagcagtttacaacaacaacatgtacgtcaacatgtacacaccgggaatattgccagagttaacctgaccaccaacacgattgctgtgactcaaactctccctaatgctgcctataataaccgcttttcatatgctaatgttgcttggcaagcatattgactttgctgtggatgagaatggattgtgggttatttattcaactgaagccagcactggttaacatggtgattagtaaactcaatgacaccacacttcaggtgctaaacacttggtataccaagcagtataaaccatctgcttctaacgccttcatggtatgtggggttctgtatgccacccgtactatgaacaccagaacagaagagattttttactattatgacacaaacacagggaaagagggcaaactagacattgtaatgcataagatgcaggaaaaagtgcagagcattaactataacccttttgaccagaaactttatgtctataacgatggttaccttctgaattatgatctttctgtcttgcagaagccccagtaagctgtttaggagttagggtgaaagagaaaatgtttgttgaaaaaatagtcttctccacttacttagatatctgcagatatctaagtaagtggagaagactattttttcaacaaacattttctctttcaccctaactcctaaacagcttactggggcttctgcaagacagaaagatcataattcagaaggtaaccatcgttatagacataaagtttctggtcaaaagggttatagttaatgctctgcactttttcctgcatcttatgcattacaatgtctagtttgccctctttccctgtgtttgtgtcataatagtaaaaaatctcttctgtttggcgtatagggattctttgtacaggaaatattgcccaatgactagtcctcatccatgtagcaccactaattcttccatgcctggaagaaacctggggacttagttaggtagattaatatctggagctcctcgagggaccaaatctccaacttttttttcccctcactagcacctggaatgatgctttgtatgtggcagataagtaaatttggcatgcttatatattctacatctgtaaagtgctgagttttatggagagaggcctttttatgcattaaattgtacatggcaaataaatcccagaaggatctgtagatgaggcacctgctttttcttttctctcattgtccaccttactaaaagtcagtagaatcttctacctcataacttccttccaaaggcagctcagaagattagaaccagacttactaaccaattccaccccccaccaacccccttctactgcctactttaaaaaaattaatagttttctatggaactgatctaagattagaaaaattaattttctttaatttcattatgaacttttatttacatgactctaagactataagaaaatctgatggcagtgacaaagtgctagcatttattgttatctaataaagaccttggagcatatgtgcaacttatgagtgtatcagttgttgcatgtaatttttgcctttgtttaagcctggaacttgtaagaaaatgaaaatttaatttttttttctaggacgagctatagaaaagctattgagagtatctagttaatcagtgcagtagttggaaaccttgctggtgtatgtgatgtgcttctgtgcttttgaatgactttatcatctagtctttgtctatttttcctttgatgttcaagtcctagtctataggattggcagtttaaatgctttactcccccttttaaaataaatgattaaaatgtgcttcgaaaaaaaaaaaaaaaaaaaaaaaaaaaaaaa

SEQ ID NO: 1701 - DNA, 3814 bp, Homo sapiens
  misc_feature 2459: n = A,T,C or G
ctattgaagccacctgctcaggacaatgaaattcttcagttacattctggtttatcgccgatttctcttcgtggttttcactgtgttggttttactacctctgcccatcgtcctccacaccaaggaagcagaatgtgcctacacactctttgtggtcgccacattttggctcacagaagcattgcctctgtcggtaacagctttgctacctagtttaatgttacccatgtttgggatcatgccttctaagaaggtggcatctgcttatttcaaggattttcacttactgctaattggagttatctgtttagcaacatccatagaaaaatggaatttgcacaagagaattgctctgaaaatggtgatgatggttggtgtaaatcctgcatggctgacgctggggttcatgagcagcactgcctttttgtctatgtggctcagcaacacctcgacggctgccatggtgatgcccattgcggaggctgtagtgcagcagatcatcaatgcagaagcagaggtcgaggccactcagatgacttacttcaacggatcaaccaaccacggactagaaattgatgaaagtgttaatggacatgaaataaatgagaggaaagagaaaacaaaaccagttccaggatacaataatgatacagggaaaatttcaagcaaggtggagttggaaaagaactcaggcatgagaaccaaatatcgaacaaagaagggccacgtgacacgtaaacttacgtgtttgtgcattgcctactcttctaccattggtggactgacaacaatcactggtacctccaccaacttgatctttgcagagtatttcaatacacgctatcctgactgtcgttgcctcaactttggatcatggtttacgttttccttcccagctgcccttatcattctactcttatcctggatctggcttcagtggcttttcctaggattcaattttaaggagatgttcaaatgtggcaaaaccaaaacagtccaacaaaaagcttgtgctgaggtgattaagcaagaataccaaaagcttgggccaataaggtatcaagaaattgtgaccttggtcctcttcattataatggctctgctatggtttagtcgagaccccggatttgttcctggttggtctgcacttttttcagagtaccctggttttgctacagattcaactgttgctttacttatagggctgctattctttcttatcccagctaagacactgactaaaactacacctacaggagaaattgttgcttttgattactctccactgattacttggaaagaattccagtcattcatgccctgggatatagccattcttgttggtggagggtttgccctggcagatggttgtgaggagtctggattatctaagtggataggaaataaattatctcctctgggttcattaccagcatggctaataattctgatatcttctttgatggtgacatctttaactgaggtagccagcaatccagctaccattacactctttctcccaatattatctccattggccgaagccattcatgtgaaccctctttatattctgataccttctactctgtgtacttcatttgcattcctcctaccagtagcaaatccacccaatgctattgtcttttcatatggtcatctgaaagtcattgacatggttaaagctggacttggtgtcaacattgttggtgttgctgtggttatgcttggcatatgtacttggattgtacccatgtttgacctctacacttacccttcgtgggctcctgctatgagtaatgagaccatgccataataagcacaaaatttctgactatcttgcggtaatttctggaagacattaatgattgactgtaaaatgtggctctaaataactaatgacacacatttaaatcagttatggtgtagctgctgcaattcccgtgaatacccgaaacctgctggtataactcagagtccatatttgttattgcagtgcaactaaagagcatctatgtgccttcatcaagaagcccatgttttgagattttgctcatgaaccatctgcaacttgcttcatcataagaataatttataacttgaccttcaaagagattagagcatttgtttcatcttacagttggagttcaatgtaacattttaaatgcaatttattatttcagaaatttcccatgaaactaaaaatagaaaataagatatacaagttaattcggtacttggataaatcatttctgcattgttgttccagagaatttgctgagaaatcaaagccatggtcatctggtgatgaagagaaaaggttaatctaaatgatatgtgcatttcctcatttaaaaaatccaattggattattcttaatatatacatgtaatatgaaaattgagattgaagcactaattccaaaattatggctgaatatactaaataacagaaaagttacngataagaatttatttctactgaactctatagttagtgtaatataattcatatttttatgatattggcacactgagaaattcattttgtagagctatggataaggcttgctatgatttgcactattagtacagtatagttagaaaggaaagctgaacactataaaactattaacatattttcgtatatgagtaacaactttgcttaagtgtttatcttagttcagaaatacataatgtcatatgttaaaaataaagagatgtagaaatctaaatgaattatcactgtgtatacagacagaaaaatcacataactctggtgtgttaacattgcaatgaaaaaatgaaaaaaagaaggaaaaaagaataagaatgaaaactgctgacgtattacaaaacagaaaaataaatgatttaaaatcaaatcaaaaagaaaaaaactaaacatttaaacaaaaatgggataagaatagtcttctagaagtgaggatgcgtaaaagaatgagtttccaattaccctgatgtgacaattacacattgtagacaggtagcaaaatatcacatacacccccaaaatatgtacaaatattatatatcaataaataaatttttaaagagtaagtgctattggcattccaaaattcagctaaaggaaaaatgatcaaaaacaaagtaaggtgcacagttagcaaaagatgcagatgttatatcacagcaattctcatgctaaaaatacaacaaaagacaaagcaaaaaataaacctttgcttttttttttttttttttttttttttgagacggagtctcgctctgtcgcccaggctggagtgcagtggcgggatctcggctcactgcaagctccgcctcccaggttcacgccattctcctgcctcagccaaacctttgctatttttaatcttcgttggcactttccagctgttactgaccttgtcattttttgttcaaataagattatttacaaacttattcttgaaactaaatatagtaaagagggtttttaaaataatatttaacatacgaattattaattggccatgttcattatttatctatgtttattaatgggccaatgcaaaaaatcattttttcaaagaaaaatttgtccatgtaaagcttaaattataatattgctgctttgtataactcttctatgtttattctattcatttgttcctttccctaccatattttacacatgtatttataatctgtagtatttattacatttctgcttttttctagtcattcaatttatcactgctgaattgcatcagatcatggatgcatttttattatgaaaaaataaaatgacttttcaaattaaaaaaaaaaaaaaa

SEQ ID NO: 1702 - DNA, 2040 bp, Homo sapiens
acggctgcttcccaccagcaaagaccacgactggagagccgagccggaggcagctgggaaacatgaagagcgtcttgctgctgaccacgctcctcgtgcctgcacacctggtggccgcctggagcaataattatgcggtggactgccctcaacactgtgacagcagtgagtgcaaaagcagcccgcgctgcaagaggacagtgctcgacgactgtggctgctgccgagtgtgcgctgcagggcggggagaaacttgctaccgcacagtctcaggcatggatggcatgaagtgtggcccggggctgaggtgtcagccttctaatggggaggatccttttggtgaagagtttggtatctgcaaagactgtccctacggcaccttcgggatggattgcagagagacctgcaactgccagtcaggcatctgtgacagggggacgggaaaatgcctgaaattccccttcttccaatattcagtaaccaagtcttccaacagatttgtttctctcacggagcatgacatggcatctggagatggcaatattgtgagagaagaagttgtgaaagagaatgctgccgggtctcccgtaatgaggaaatggttaaatccacgctgatcccggctgtgatttctgagagaaggctctattttcgtgattgttcaacacacagccaacattttaggaactttctagattatagcataaggacatgtaatttttgaagaccaaatgtgatgcatggtggatccagaaaacaaaaagtaggatacttacaatccataacatccatatgactgaacacttgtatgtgtttgttaaatattcgaatgcatgtagatttgttaaatgtgtgtgtatagtaacactgaagaactaaaaatgcaatttaggtaatcttacgtggagacaggtcaaccaaagagggagctaggcaaagctgaagaccgcagtgagtcaaattagttctttgactttgatgtacattaatgttgggatatggaatgaagacttaagagcaggagaagatggggagggggtgggagtgggaaataaaatatttagcccttccttggtaggtagcttctctagaatttaattgtgcttttttttttttttttggctttgggaaaagtcaaaataaaacaaccagaaaacccctgaaggaagtaagatgtttgaagcttatggaaatttgagtaacaaacagctttgaactgagagcaatttcaaaaggctgctgatgtagttcccgggttacctgtatctgaaggacggttctggggcataggaaacacatacacttccataaatagctttaacgtatgccacctcagagataaatctaagaagtattttacccactggtggtttgtgtgtgtatgaaggtaaatatttatatatttttataaataaatgtgttagtgcaagtcatcttccctacccatatttatcatcctcttgaggaaagaaatctagtattatttgttgaaaatggttagaataaaactatgactctataaggttttcaaacatctgaggcatgataaatttattatccataattatagtaataataaccttaataagcataagaaaaacagagtcactctggatttcaaaaatgtcaaaaaatgagcaacagagggtccttatttaaacataagtgctgtgacttaggtgaattttcaatttaaggtagaaaataagtttttaggaggtttgtaaaagaagaatcaattttcagcagaaaacatgtcaactttaaaataagtggaattaggagtatatttgaaagaatcttagcacaaacaggactgttgtactagatgttcttaggaaatatctcagaagtattttatttgaagtgaagaacttatttaagaattatttcagtatttacctgtattttattcttgaagttggccaacagagttgtgaatgtgtgtgggaaggcctttgaatgtaaagctgcataagctgttaggttttgttttaaaaggacatgtttattattgttcaataaaaaagaacaagatac

SEQ ID NO: 1703 - DNA, 3219 bp, Homo sapiens
ggcacgaggggccagagtccggagcagccgccgcccgaccgcgccgagctcagttcgctgtccgcgccggctcccaccccggcccgaccccgacccggcccggtcaggccccatactcagtagccacgatggaggtgatgaacctgatggagcagcctatcaaggtgactgagtggcagcagacatacacctacgactcgggtatccactcgggcgccaacacctgcgtgccctccgtcagcagcaagggcatcatggaggaggatgaggcctgcgggcgccagtacacgctcaagaaaaccaccacttacacccagggggtgccccccagccaaggtgacctggagtaccagatgtccacaacagccagggccaaacgggtgcgggaggccatgtgccctggtgtgtcaggcgaggacagctcgcttctgctggccacccaggtggaggggcaggccaccaacctgcagcgactggccgagccgtcccagctgctcaagtcggccattgtgcatctcatcaactaccaggacgatgccgagctggccactcgcgccctgcccgagctcaccaaactgctcaacgacgaggacccggtggtggtgaccaaggcggccatgattgtgaaccagctgtcgaagaaggaggcgtcgcggcgggccctgatgggctcgccccagctggtggccgctgtcgtgcgtaccatgcagaataccagcgacctggacacagcccgctgcaccaccagcatcctgcacaacctctcccaccaccgggaggggctgctcgccatcttcaagtcgggtggcatccctgctctggtccgcatgctcagctcccctgtggagtcggtcctgttctatgccatcaccacgctgcacaacctgctcctgtaccaggagggcgccaagatggccgtgcgcctggccgacgggctgcaaaagatggtgcccctgctcaacaagaacaaccccaagttcctggccatcaccaccgactgcctgcagctcctggcctacggcaaccaggagagcaagctgatcatcctggccaatggtgggccccaggccctcgtgcagatcatgcgtaactacagttatgaaaagctgctctggaccaccagtcgtgtgctcaaggtgctatccgtgtgtcccagcaataagcctgccattgtggaggctggtgggatgcaggccctgggcaagcacctgaccagcaacagcccccgcctggtgcagaactgcctgtggaccctgcgcaacctctcagatgtggccaccaagcaggagggcctggagagtgtgctgaagattctggtgaatcagctgagtgtggatgacgtcaacgtcctcacctgtgccacgggcacactctccaacctgacatgcaacaacagcaagaacaagacgctggtgacacagaacagcggtgtggaggctctcatccatgccatcctgcgtgctggtgacaaggacgacatcacggagcctgccgtctgcgctctgcgccacctcactagccgccaccctgaggccgagatggcccagaactctgtgcgtctcaactatggcatcccagccatcgtgaagctgctcaaccagcccaaccagtggccactggtcaaggcaaccatcggcttgatcaggaatctggccctgtgcccagccaaccatgccccgctgcaggaggcagcggtcatcccccgcctcgtccaactgctggtgaaggcccaccaggatgcccagcgccacgtagctgcaggcacacagcagccctacacggatggtgtgaggatggaggagattgtggagggctgcaccggagcactgcacatcctcgcccgggaccccatgaaccgcatggagatcttccggctcaacaccattcccctgtttgtgcagctcctgtactcgtcggtggagaacatccagcgcgtggctgccggggtgctgtgtgagctggcccaggacaaggaggcggccgacgccattgatgcagagggggcctcggccccactcatggagttgctgcactcccgcaacgagggcactgccacctacgctgctgccgtcctgttccgcatctccgaggacaagaacccagactaccggaagcgcgtgtccgtggagctcaccaactccctcttcaagcatgacccggctgcctgggaggctgcccagagcatgattcccatcaatgagccctatggagatgacttggatgccacctaccgccccatgtactccagcgatgtgccccttgacccgctggagatgcacatggacatggatggagactaccccatcgacacctacagcgacggcctcaggcccccgtaccccactgcagaccacatgctggcctaggcggcctggccccagtgcggttcctcatctgagaggctctccgtgcaggcgatggggcaagacagaaaagtgcctgagctggggaagccggggtgtaacttcctgctgcaccctgcgcctccagaggtcctccgtagggtctttcttgggatagtgttctgctcctgcttttctgtcctgggcatgggtccagggcctgacaccccctccccgcccctgtggccctggccactaaagcttcagactcaagtacccattctgttttcccccagcaacgcccctccaaacctccagcctccctgtctccagctgcctgggcccggaagggctttggttccttctctgggtctgattttctcactgaactccaccgaccaactgccctaagcccccagggcctccagggcccaggttcgagacccaaacccccaaaatccaaaacttctcttgaaaagttcagggaccgtccaggggagatggggaggagatatggagtgagtcacctgctccagaagatgccagcttctctctccagggtgcttagttggctttgcccacccctcactccccagggagctctggggacagcttcctcacacccctgtcccacccacacagctgccctagctgaccccgagaagtgctcttggctgacccctctggtgtgtggtgaggggctttctcttccccttcctgtttcagacccccccatttcccgcacatggtgtggggggctgggggaggtccaagcagagtgttttattattatcgctttatgtttttggttattggtttttttgtatagaccaaagcaaagaaaataaaaataacacagaaaaaaaaaaaaaaaaaa

SEQ ID NO: 1704 - DNA, 3166 bp, Homo sapiens
aagagctccagagagaagtcgaggaagagagagacggggtcagagagagcgcgcgggcgtgcgagcagcgaaagcgacaggggcaaagtgagtgacctgcttttgggggtgaccgccggagcgcggcgtgagccctcccccttgggatcccgcagctgaccagtcgcgctgacggacagacagacagacaccgcccccagccccagttaccacctcctccccggccggcggcggacagtggacgcggcggcgagccgcgggcaggggccggagcccgcccccggaggcggggtggagggggtcggagctcgcggcgtcgcactgaaacttttcgtccaacttctgggctgttctcgcttcggaggagccgtggtccgcgcgggggaagccgagccgagcggagccgcgagaagtgctagctcgggccgggaggagccgcagccggaggagggggaggaggaagaagagaaggaagaggagagggggccgcagtggcgactcggcgctcggaagccgggctcatggacgggtgaggcggcggtgtgcgcagacagtgctccagcgcgcgcgctccccagccctggcccggcctcgggccgggaggaagagtagctcgccgaggcgccgaggagagcgggccgccccacagcccgagccggagagggacgcgagccgcgcgccccggtcgggcctccgaaaccatgaactttctgctgtcttgggtgcattggagccttgccttgctgctctacctccaccatgccaagtggtcccaggctgcacccatggcagaaggaggagggcagaatcatcacgaagtggtgaagttcatggatgtctatcagcgcagctactgccatccaatcgagaccctggtggacatcttccaggagtaccctgatgagatcgagtacatcttcaagccatcctgtgtgcccctgatgcgatgcgggggctgctccaatgacgagggcctggagtgtgtgcccactgaggagtccaacatcaccatgcagattatgcggatcaaacctcaccaaggccagcacataggagagatgagcttcctacagcacaacaaatgtgaatgcagaccaaagaaagatagagcaagacaagaaaatccctgtgggccttgctcagagcggagaaagcatttgtttgtacaagatccgcagacgtgtaaatgttcctgcaaaaacacacactcgcgttgcaaggcgaggcagcttgagttaaacgaacgtacttgcagatgtgacaagccgaggcggtgagccgggcaggaggaaggagcctccctcagggtttcgggaaccagatctctctccaggaaagactgatacagaacgatcgatacagaaaccacgctgccgccaccacaccatcaccatcgacagaacagtccttaatccagaaacctgaaatgaaggaagaggagactctgcgcagagcactttgggtccggagggcgagactccggcggaagcattcccgggcgggtgacccagcacggtccctcttggaattggattcgccattttatttttcttgctgctaaatcaccgagcccggaagattagagagttttatttctgggattcctgtagacacacccacccacatacatacatttatatatatatatattatatatatataaaaataaatatctctattttatatatataaaatatatatattctttttttaaattaacagtgctaatgttattggtgtcttcactggatgtatttgactgctgtggacttgagttgggaggggaatgttcccactcagatcctgacagggaagaggaggagatgagagactctggcatgatcttttttttgtcccacttggtggggccagggtcctctcccctgcccaagaatgtgcaaggccagggcatgggggcaaatatgacccagttttgggaacaccgacaaacccagccctggcgctgagcctctctaccccaggtcagacggacagaaagacaaatcacaggttccgggatgaggacaccggctctgaccaggagtttggggagcttcaggacattgctgtgctttggggattccctccacatgctgcacgcgcatctcgcccccaggggcactgcctggaagattcaggagcctgggcggccttcgcttactctcacctgcttctgagttgcccaggaggccactggcagatgtcccggcgaagagaagagacacattgttggaagaagcagcccatgacagcgccccttcctgggactcgccctcatcctcttcctgctccccttcctggggtgcagcctaaaaggacctatgtcctcacaccattgaaaccactagttctgtccccccaggaaacctggttgtgtgtgtgtgagtggttgaccttcctccatcccctggtccttcccttcccttcccgaggcacagagagacagggcaggatccacgtgcccattgtggaggcagagaaaagagaaagtgttttatatacggtacttatttaatatccctttttaattagaaattagaacagttaatttaattaaagagtagggttttttttcagtattcttggttaatatttaatttcaactatttatgagatgtatcttttgctctctcttgctctcttatttgtaccggtttttgtatataaaattcatgtttccaatctctctctccctgatcggtgacagtcactagcttatcttgaacagatatttaattttgctaacactcagctctgccctccccgatcccctggctccccagcacacattcctttgaaagagggtttcaatatacatctacatactatatatatattgggcaacttgtatttgtgtgtatatatatatatatatgtttatgtatatatgtgatcctgaaaaaataaacatcgctattctgttttttatatgttcaaaccaaacaagaaaaaatagagaattctacatactaaatctctctccttttttaattttaatatttgttatcatttatttattggtgctactgtttatccgtaataattgtggggaaaagatattaacatcacgtctttgtctctagtgcagtttttcgagatattccgtagtacatatttatttttaaacaacgacaaagaaatacagatatatcttaaaaaaaaaaaa

SEQ ID NO: 1705 - DNA, 1127 bp, Homo sapiens
accaaatcaaccataggtccaagaacaattgtctctggacggcagctatgcgactcaccgtgctgtgtgctgtgtgcctgctgcctggcagcctggccctgccgctgcctcaggaggcgggaggcatgagtgagctacagtgggaacaggctcaggactatctcaagagattttatctctatgactcagaaacaaaaaatgccaacagtttagaagccaaactcaaggagatgcaaaaattctttggcctacctataactggaatgttaaactcccgcgtcatagaaataatgcagaagcccagatgtggagtgccagatgttgcagaatactcactatttccaaatagcccaaaatggacttccaaagtggtcacctacaggatcgtatcatatactcgagacttaccgcatattacagtggatcgattagtgtcaaaggctttaaacatgtggggcaaagagatccccctgcatttcaggaaagttgtatggggaactgctgacatcatgattggctttgcgcgaggagctcatggggactcctacccatttgatgggccaggaaacacgctggctcatgcctttgcgcctgggacaggtctcggaggagatgctcacttcgatgaggatgaacgctggacggatggtagcagtctagggattaacttcctgtatgctgcaactcatgaacttggccattctttgggtatgggacattcctctgatcctaatgcagtgatgtatccaacctatggaaatggagatccccaaaattttaaactttcccaggatgatattaaaggcattcagaaactatatggaaagagaagtaattcaagaaagaaatagaaacttcaggcagaacatccattcattcattcattggattgtatatcattgttgcacaatcagaattgataagcactgttcctccactccatttagcaattatgtcacccttttttattgcagttggtttttgaatgtctttcactccttttattggttaaactcctttatggtgtgactgtgtcttattccatctatgagctttgtcagtgcgcgtagatgtcaataaatgttacatacacaaataaataaaatgtttattccatggtaaattta

SEQ ID NO: 1706 - DNA, 1971 bp, Homo sapiens
gcgcacgccggcctcgaagaacttctgcttgggtggctgaactctgatcttgacctagagtcatggccatggcaaccaaaggaggtactgtcaaagctgcttcaggattcaatgccatggaagatgcccagaccctgaggaaggccatgaaagggctcggcaccgatgaagacgccattattagcgtccttgcctaccgcaacaccgcccagcgccaggagatcaggacagcctacaagagcaccatcggcagggacttgatagacgacctgaagtcagaactgagtggcaacttcgagcaggtgattgtggggatgatgacgcccacggtgctgtatgacgtgcaagagctgcgaagggccatgaagggagccggcactgatgagggctgcctaattgagatcctggcctcccggacccctgaggagatccggcgcataagccaaacctaccagcagcaatatggacggagccttgaagatgacattcgctctgacacatcgttcatgttccagcgagtgctggtgtctctgtcagctggtgggagggatgaaggaaattatctggacgatgctctcgtgagacaggatgcccaggacctgtatgaggctggagagaagaaatgggggacagatgaggtgaaatttctaactgttctctgttcccggaaccgaaatcacctgttgcatgtgtttgatgaatacaaaaggatatcacagaaggatattgaacagagtattaaatctgaaacatctggtagctttgaagatgctctgctggctatagtaaagtgcatgaggaacaaatctgcatattttgctgaaaagctctataaatcgatgaagggcttgggcaccgatgataacaccctcatcagagtgatggtttctcgagcagaaattgacatgttggatatccgggcacacttcaagagactctatggaaagtctctgtactcgttcatcaagggtgacacatctggagactacaggaaagtactgcttgttctctgtggaggagatgattaaaataaaaatcccagaaggacaggaggattctcaacactttgaatttttttaacttcatttttctacactgctattatcattatctcagaatgcttatttccaattaaaacgcctacagctgcctcctagaatatagactgtctgtattattattcacctataattagtcattatgatgctttaaagctgtacttgcatttcaaagcttataagatataaatggagattttaaagtagaaataaatatgtattccatgtttttaaaagattactttctactttgtgtttcacagacattgaatatattaaattattccatattttcttttcagtgaaaaattttttaaatggaagactgttctaaaatcacttttttccctaatccaatttttagagtggctagtagtttcttcatttgaaattgtaagcatccggtcagtaagaatgcccatccagttttctatatttcatagtcaaagccttgaaagcatctacaaatctctttttttaggttttgtccatagcatcagttgatccttactaagtttttcatgggagacttccttcatcacatcttatgttgaaatcactttctgtagtcaaagtataccaaaaccaatttatctgaactaaattctaaagtatggttatacaaaccatatacatctggttaccaaacataaatgctgaacattccatattattatagttaatgtcttaatccagcttgcaagtgaatggaaaaaaaaataagcttcaaactaggtattctgggaatgatgtaatgctctgaatttagtatgatataaagaaaacttttttgtgctaaaaatactttttaaaatcaattttgttgattgtagtaatttctatttgcactgtgcctttcaactccagaaacattctaagatgtacttggatttaattaaaaagttcactttgt

SEQ ID NO: 1707 - DNA, 4586 bp, Homo sapiens
gaattccgccctcgccgcccgcggcgccccgagcgctttgtgagcagatgcggagccgagtggagggcgcgagccagatgcggggcgacagctgacttgctgagaggaggcggggaggcgcggagcgcgcgtgtggtccttgcgccgctgacttctccactggttcctgggcaccgaaagataaacctctcataatgaaggcccccgctgtgcttgcacctggcatcctcgtgctcctgtttaccttggtgcagaggagcaatggggagtgtaaagaggcactagcaaagtccgagatgaatgtgaatatgaagtatcagcttcccaacttcaccgcggaaacacccatccagaatgtcattctacatgagcatcacattttccttggtgccactaactacatttatgttttaaatgaggaagaccttcagaaggttgctgagtacaagactgggcctgtgctggaacacccagattgtttcccatgtcaggactgcagcagcaaagccaatttatcaggaggtgtttggaaagataacatcaacatggctctagttgtcgacacctactatgatgatcaactcattagctgtggcagcgtcaacagagggacctgccagcgacatgtctttccccacaatcatactgctgacatacagtcggaggttcactgcatattctccccacagatagaagagcccagccagtgtcctgactgtgtggtgagcgccctgggagccaaagtcctttcatctgtaaaggaccggttcatcaacttctttgtaggcaataccataaattcttcttatttcccagatcatccattgcattcgatatcagtgagaaggctaaaggaaacgaaagatggttttatgtttttgacggaccagtcctacattgatgttttacctgagttcagagattcttaccccattaagtatgtccatgcctttgaaagcaacaattttatttacttcttgacggtccaaagggaaactctagatgctcagacttttcacacaagaataatcaggttctgttccataaactctggattgcattcctacatggaaatgcctctggagtgtattctcacagaaaagagaaaaaagagatccacaaagaaggaagtgtttaatatacttcaggctgcgtatgtcagcaagcctggggcccagcttgctagacaaataggagccagcctgaatgatgacattcttttcggggtgttcgcacaaagcaagccagattctgccgaaccaatggatcgatctgccatgtgtgcattccctatcaaatatgtcaacgacttcttcaacaagatcgtcaacaaaaacaatgtgagatgtctccagcatttttacggacccaatcatgagcactgctttaataggacacttctgagaaattcatcaggctgtgaagcgcgccgtgatgaatatcgaacagagtttaccacagctttgcagcgcgttgacttattcatgggtcaattcagcgaagtcctcttaacatctatatccaccttcattaaaggagacctcaccatagctaatcttgggacatcagagggtcgcttcatgcaggttgtggtttctcgatcaggaccatcaacccctcatgtgaattttctcctggactcccatccagtgtctccagaagtgattgtggagcatacattaaaccaaaatggctacacactggttatcactgggaagaagatcacgaagatcccattgaatggcttgggctgcagacatttccagtcctgcagtcaatgcctctctgccccaccctttgttcagtgtggctggtgccacgacaaatgtgtgcgatcggaggaatgcctgagcgggacatggactcaacagatctgtctgcctgcaatctacaaggttttcccaaatagtgcaccccttgaaggagggacaaggctgaccatatgtggctgggactttggatttcggaggaataataaatttgatttaaagaaaactagagttctccttggaaatgagagctgcaccttgactttaagtgagagcacgatgaatacattgaaatgcacagttggtcctgccatgaataagcatttcaatatgtccataattatttcaaatggccacgggacaacacaatacagtacattctcctatgtggatcctgtaataacaagtatttcgccgaaatacggtcctatggctggtggcactttacttactttaactggaaattacctaaacagtgggaattctagacacatttcaattggtggaaaaacatgtactttaaaaagtgtgtcaaacagtattcttgaatgttataccccagcccaaaccatttcaactgagtttgctgttaaattgaaaattgacttagccaaccgagagacaagcatcttcagttaccgtgaagatcccattgtctatgaaattcatccaaccaaatcttttattagtggtgggagcacaataacaggtgttgggaaaaacctgaattcagttagtgtcccgagaatggtcataaatgtgcatgaagcaggaaggaactttacagtggcatgtcaacatcgctctaattcagagataatctgttgtaccactccttccctgcaacagctgaatctgcaactccccctgaaaaccaaagcctttttcatgttagatgggatcctttccaaatactttgatctcatttatgtacataatcctgtgtttaagccttttgaaaagccagtgatgatctcaatgggcaatgaaaatgtactggaaattaagggaaatgatattgaccctgaagcagttaaaggtgaagtgttaaaagttggaaataagagctgtgagaatatacacttacattctgaagccgttttatgcacggtccccaatgacctgctgaaattgaacagcgagctaaatatagagtggaagcaagcaatttcttcaaccgtccttggaaaagtaatagttcaaccagatcagaatttcacaggattgattgctggtgttgtctcaatatcaacagcactgttattactacttgggtttttcctgtggctgaaaaagagaaagcaaattaaagatctgggcagtgaattagttcgctacgatgcaagagtacacactcctcatttggataggcttgtaagtgcccgaagtgtaagcccaactacagaaatggtttcaaatgaatctgtagactaccgagctacttttccagaagatcagtttcctaattcatctcagaacggttcatgccgacaagtgcagtatcctctgacagacatgtcccccatcctaactagtggggactctgatatatccagtccattactgcaaaatactgtccacattgacctcagtgctctaaatccagagctggtccaggcagtgcagcatgtagtgattgggcccagtagcctgattgtgcatttcaatgaagtcataggaagagggcattttggttgtgtatatcatgggactttgttggacaatgatggcaagaaaattcactgtgctgtgaaatccttgaacagaatcactgacataggagaagtttcccaatttctgaccgagggaatcatcatgaaagattttagtcatcccaatgtcctctcgctcctgggaatctgcctgcgaagtgaagggtctccgctggtggtcctaccatacatgaaacatggagatcttcgaaatttcattcgaaatgagactcataatccaactgtaaaagatcttattggctttggtcttcaagtagccaaaggcatgaaatatcttgcaagcaaaaagtttgtccacagagacttggctgcaagaaactgtatgctggatgaaaaattcacagtcaaggttgctgattttggtcttgccagagacatgtatgataaagaatactatagtgtacacaacaaaacaggtgcaaagctgccagtgaagtggatggctttggaaagtctgcaaactcaaaagtttaccaccaagtcagatgtgtggtcctttggcgtcgtcctctgggagctgatgacaagaggagccccaccttatcctgacgtaaacacctttgatataactgtttacttgttgcaagggagaagactcctacaacccgaatactgcccagaccccttatatgaagtaatgctaaaatgctggcaccctaaagccgaaatgcgcccatccttttctgaactggtgtcccggatatcagcgatcttctctactttcattggggagcactatgtccatgtgaacgctacttatgtgaacgtaaaatgtgtcgctccgtatccttctctgttgtcatcagaagataacgctgatgatgaggtggacacacgaccagcctccttctgggagacatcatagtgctagtactatgtcaaagcaacagtccacactttgtccaatggttttttcactgcctgacctttaaaaggccatcgatattctttgctccttgccaaattgcactattaataggacttgtattgttatttaaattactggattctaaggaatttcttatctgacagagcatcagaaccagaggcttggtcccacaggccagggaccaatgcgctgcag

SEQ ID NO: 1708 - DNA, 2691 bp, Homo sapiens
gcttgcccgtcggtcgctagctcgctcggtgcgcgtcgtcccgctccatggcgctcttcgtgcggctgctggctctcgccctggctctggccctgggccccgccgcgaccctggcgggtcccgccaagtcgccctaccagctggtgctgcagcacagcaggctccggggccgccagcacggccccaacgtgtgtgctgtgcagaaggttattggcactaataggaagtacttcaccaactgcaagcagtggtaccaaaggaaaatctgtggcaaatcaacagtcatcagctacgagtgctgtcctggatatgaaaaggtccctggggagaagggctgtccagcagccctaccactctcaaacctttacgagaccctgggagtcgttggatccaccaccactcagctgtacacggaccgcacggagaagctgaggcctgagatggaggggcccggcagcttcaccatcttcgcccctagcaacgaggcctgggcctccttgccagctgaagtgctggactccctggtcagcaatgtcaacattgagctgctcaatgccctccgctaccatatggtgggcaggcgagtcctgactgatgagctgaaacacggcatgaccctcacctctatgtaccagaattccaacatccagatccaccactatcctaatgggattgtaactgtgaactgtgcccggctcctgaaagccgaccaccatgcaaccaacggggtggtgcacctcatcgataaggtcatctccaccatcaccaacaacatccagcagatcattgagatcgaggacacctttgagacccttcgggctgctgtggctgcatcagggctcaacacgatgcttgaaggtaacggccagtacacgcttttggccccgaccaatgaggccttcgagaagatccctagtgagactttgaaccgtatcctgggcgacccagaagccctgagagacctgctgaacaaccacatcttgaagtcagctatgtgtgctgaagccatcgttgcggggctgtctgtagagaccctggagggcacgacactggaggtgggctgcagcggggacatgctcactatcaacgggaaggcgatcatctccaataaagacatcctagccaccaacggggtgatccactacattgatgagctactcatcccagactcagccaagacactatttgaattggctgcagagtctgatgtgtccacagccattgaccttttcagacaagccggcctcggcaatcatctctctggaagtgagcggttgaccctcctggctcccctgaattctgtattcaaagatggaacccctccaattgatgcccatacaaggaatttgcttcggaaccacataattaaagaccagctggcctctaagtatctgtaccatggacagaccctggaaactctgggcggcaaaaaactgagagtttttgtttatcgtaatagcctctgcattgagaacagctgcatcgcggcccacgacaagagggggaggtacgggaccctgttcacgatggaccgggtgctgacccccccaatggggactgtcatggatgtcctgaagggagacaatcgctttagcatgctggtagctgccatccagtctgcaggactgacggagaccctcaaccgggaaggagtctacacagtctttgctcccacaaatgaagccttccgagccctgccaccaagagaacggagcagactcttgggagatgccaaggaacttgccaacatcctgaaataccacattggtgatgaaatcctggttagcggaggcatcggggccctggtgcggctaaagtctctccaaggtgacaagctggaagtcagcttgaaaaacaatgtggtgagtgtcaacaaggagcctgttgccgagcctgacatcatggccacaaatggcgtggtccatgtcatcaccaatgttctgcagcctccagccaacagacctcaggaaagaggggatgaacttgcagactctgcgcttgagatcttcaaacaagcatcagcgttttccagggcttcccagaggtctgtgcgactagcccctgtctatcaaaagttattagagaggatgaagcattagcttgaagcactacaggaggaatgcaccacggcagctctccgccaatttctctcagatttccacagagactgtttgaatgttttcaaaaccaagtatcacactttaatgtacatgggccgcaccataatgagatgtgagccttgtgcatgtgggggaggagggagagagatgtactttttaaatcatgttccccctaaacatggctgttaacccactgcatgcagaaacttggatgtcactgcctgacattcacttccagagaggacctatcccaaatgtggaattgactgcctatgccaagtccctggaaaaggagcttcagtattgtggggctcataaaacatgaatcaagcaatccagcctcatgggaagtcctggcacagtttttgtaaagcccttgcacagctggagaaatggcatcattataagctatgagttgaaatgttctgtcaaatgtgtctcacatctacacgtggcttggaggcttttatggggccctgtccaggtagaaaagaaatggtatgtagagcttagatttccctattgtgacagagccatggtgtgtttgtaataataaaaccaaagaaacata

SEQ ID NO: 1709 - DNA, 3503 bp, Homo sapiens
atggggggatgcacggtgaagcctcagctgctgctcctggcgctcgtcctccacccctggaatccctgtctgggtgcggactcggagaagccctcgagcatccccacagataaattattagtcataactgtagcaacaaaagaaagtgatggattccatcgatttatgcagtcagccaaatatttcaattatactgtgaaggtccttggtcaaggagaagaatggagaggtggtgatggaattaatagtattggagggggccagaaagtgagattaatgaaagaagtcatggaacactatgctgatcaagatgatctggttgtcatgtttactgaatgctttgatgtcatatttgctggtggtccagaagaagttctaaaaaaattccaaaaggcaaaccacaaagtggtctttgcagcagatggaattttgtggccagataaaagactagcagacaagtatcctgttgtgcacattgggaaacgctatctgaattcaggaggatttattggctatgctccatatgtcaaccgtatagttcaacaatggaatctccaggataatgatgatgatcagctcttttacactaaagtttacattgatccactgaaaagggaagctattaacatcacattggatcacaaatgcaaaattttccagaccttaaatggagctgtagatgaagttgttttaaaatttgaaaatggcaaagccagagctaagaatacattttatgaaacattaccagtggcaattaatggaaatggacccaccaagattctcctgaattattttggaaactatgtacccaattcatggacacaggataatggctgcactctttgtgaattcgatacagtcgacttgtctgcagtagatgtccatccaaacgtatcaataggtgtttttattgagcaaccaaccccttttctacctcggtttctggacatattgttgacactggattacccaaaagaagcacttaaactttttattcataacaaagaagtttatcatgaaaaggacatcaaggtattttttgataaagctaagcatgaaatcaaaactataaaaatagtaggaccagaagaaaatctaagtcaagcggaagccagaaacatgggaatggacttttgccgtcaggatgaaaagtgtgattattactttagtgtggatgcagatgttgttttgacaaatccaaggactttaaaaattttgattgaacaaaacagaaagatcattgctcctcttgtaactcgtcatggaaagctgtggtccaatttctggggagcattgagtcctgatggatactatgcacgatctgaagattatgtggatattgttcaagggaatagagtaggagtatggaatgtcccatatatggctaatgtgtacttaattaaaggaaagacactccgatcagagatgaatgaaaggaactattttgttcgtgataaactggatcctgatatggctctttgccgaaatgctagagaaatgggtgtatttatgtacatttctaatagacatgaatttggaaggctattatccactgctaattacaatacttcccattataacaatgacctctggcagatttttgaaaatcctgtggactggaaggaaaagtatataaaccgtgattattcaaagattttcactgaaaatatagttgaacagccctgtccagatgtcttttggttccccatattttctgaaaaagcctgtgatgaattggtagaagaaatggaacattacggcaaatggtctgggggaaaacatcatgatagccgtatatctggtggttatgaaaatgtcccaactgatgatatccacatgaagcaagttgatctggagaatgtatggcttgattttatccgggagttcattgcaccagttacactgaaggtctttgcaggctattatacgaagggatttgcactactgaattttgtagtaaaatactcccctgaacgacagcgttctcttcgtcctcatcatgatgcttctacatttaccataaacattgcacttaataacgtgggagaagactttcagggaggtggttgcaaatttctaaggtacaattgctctattgagtcaccacgaaaaggctggagcttcatgcatcctgggagactcacacatttgcatgaaggacttcctgttaaaaatggaacaagatacattgcagtgtcatttatagatccctaagttatttacttttcattgaattgaaatttattttgggtgaatgactggcatgaacacgtctttgaagttgtggctgagaagatgagaggaatatttaaataacatcaacagaacaacttcactttgggccaaacatttgaaaaactttttataaaaaattgtttgatatttcttaatgtctgctctgagccttaaaacacagattgaagaagaaaagaaagaaaaaacttaaatatttatttctatgctttgttgcctctgagaataatgacaatttatgaatttgtgtttcaaattgataaaatatttaggtacaaataacaagactaataatattttcttatttaaaaaaagcatgggaagatttttatttatcaaaatatagaggaaatgtagacaaaatggatataaatgaaaattaccatgttgtaaaaccttgaaaatcagattctaactgattgtatgcaactaagtatttctgaacacctatgcaggtcttatttacagtgttactaagggaacacacaaagaattacacaacgttttcctcaagaaaatggtacaaaacacaaccgaggagcgtatacagttgaaaacatttttgttttgattggaaggcagattattttatattagtattaaaaatcaaaccctatgtttctttcagatgaatcttccaaagtggattatattaagcaggtattagatttagaaaacctttccatttcttaaagtattatcaagtgtcaagatcagcaagtgtccttaagtcaaataggtttttttttgttggtggttgtgcttgctttccttttttagaaagttctagaaaataggaaaacgaaaaatttcattgagatgagtagtgcatttaattattttttaaaaaactttttaagtacttgaattttatatcaggaaaacaaagttgttgagccttgcttcttccgttttgccctttgtctcgctccttattcttttttggggggagggttatttgcttttttatcttcctggcataatttccattttattcttctgagtgtctatgttaacttccctctatcccgcttataaaaaaattctccaacaaaaatacttgttgacttgatgttttatcacttctctaagtaaggttgaaatatccttattgtagctactgtttttaatgtaaaggttaaacttgaaaagaaattcttaatcacggtgccaaaattcattttctaacaccatgtgttagaaaattataaaaaataaaataattttaaaaaaaaaaaaaaaaaaaaaaa

SEQ ID NO: 1710 - DNA, 2529 bp, Homo sapiens
cttggctcttacaatgctcacttgttttcacaatgcagcaaaatgaaatgccttagaaaaagagtaacattccagaaaacggtgtaatttatttttcttccttaattgccccatctgtggaggatttctttgctgaacaccacatcaaagggatcttctgcatttaaaatagaagaggcatcatgctgaagagggaggggaaggtccaaccttacactaaaaccctggatggaggatggggatggatgattgtgattcattttttcctggtgaatgtgtttgtgatggggatgaccaagacttttgcaattttctttgtggtctttcaagaagagtttgaaggcacctcagagcaaattggttggattggatccatcatgtcatctcttcgtttttgtgcaggtcccctggttgctattatttgtgacatacttggagagaaaactacctccattcttggggctttcgttgttactggtggatatctgatcagcagctgggccacaagtattccttttctttgtgtgactatgggacttctacccggtttgggttctgctttcttataccaagtggctgctgtggtaactaccaaatacttcaaaaaacgattggctctttctacagctattgcccgttctgggatgggactgacttttcttttggcaccctttacaaaattcctgatagatctgtatgactggacaggagcccttatattatttggagctatcgcattgaatttggtgccttctagtatgctcttaagacccatccatatcaaaagtgagaacaattctggtattaaagataaaggcagcagtttgtctgcacatggtccagaggcacatgcaacagaaacacactgccatgagacagaagagtctaccatcaaggacagtactacgcagaaggctggactacctagcaaaaatttaacagtctcacaaaatcaaagtgaagagttctacaatgggcctaacaggaacagactgttattaaagagtgatgaagaaagtgataaggttatttcgtggagctgcaaacaactgtttgacatttctctctttagaaatcctttcttctacatatttacttggtcttttctcctcagtcagttagcatacttcatccctacctttcacctggtagccagagccaaaacactggggattgacatcatggatgcctcttaccttgtttctgtagcaggtatccttgagacggtcagtcagattatttctggatgggttgctgatcaaaactggattaagaagtatcattaccacaagtcttacctcatcctctgcggcatcactaacctgcttgctcctttagccaccacatttccactacttatgacctacaccatctgctttgccatctttgctggtggttacctggcattgatactgcctgtactggttgatctgtgtaggaattctacagtaaacaggtttttgggacttgccagtttctttgctgggatggctgtcctttctggaccacctatagcaggctggttatatgattatacccagacatacaatggctctttctacttctctggcatatgctatctcctctcttcagtttcctttttttttgtaccattggccgaaagatggaaaaacagtctgacctgaaagaaagaagactgcaatcaagtgagagctaaacaaaagaaaacctaaactaatgtcattggaaacaaaagcttgaaagaaacacatcgcatctacatttgtaacatgagaaggaaaacaatttttttttttttttttttgagacggagtctcgctctttcgcccaggctggagtgcagtggcgcaatctcggctcactgtaatctccgcctcctgggttcaagggattctcctgcctcagcctcccaagtagctgggactacaggcacacgccaccacacccagctaattttttgtatttttagtagaggcggggtttcaccatgttagccaggatggtctccatctcctgacctcgtgatccgcccgccttgtcctccaaagtgctgggattacaggcatgagccactgggcgcggccagataagtttttaaggttccttcttgctttagcattctgagaaatgtctaattggtagtaagacaagagtaatagcaacctgtattgttagtatttaaccaaataggctaaaattttaatcaggtaccttatgtattaaatagaaatcggaatgtaccataataaatccaaactctcaattacgccatggtaattcagtcactaaaatatgtaaagatagaaaattttttaatttaaagaagtgtgaaacatagccattgattgatcagaattctggaatctgaatattaaaaccttacttagtgactggaatggtatatgctccctccaaaagtttatctttgtttattgattaaaggtaatccttactttctttgtattacttaggttctcaattaaaggtaatccttactttctttgtattacttaggttcttaaatttctatgataaacatgtattgct

SEQ ID NO: 1711 - DNA, 6911 bp, Homo sapiens
tcgaccgcccagccaggtgcaaaatgccgtgtcattgggagactccgcagccggagcattagattacagctcgacggagctcgggaagggcggcgggggtggaagatgagcagaagcccctgttctcggaacgccggctgacaagcggggtgagcgcaggcggggcggggacccagcctagcccactggagcagccgggggtggcccgttcccctttaagagcaactgctctaagccaggagccagagattcgagccggcctcgcccagccagccctctccagcgaggggacccacaagcggcgcctcggccctcccgacctttccgagccctctttgcgccctgggcgcacggggccctacacgcgccaagcatgctgagggtcttcatcctctatgccgagaacgtccacacacccgacaccgacatcagcgatgcctactgctccgcggtgtttgcaggggtgaagaagagaaccaaagtcatcaagaacagcgtgaaccctgtatggaatgagggatttgaatgggacctcaagggcatccccctggaccagggctctgagcttcatgtggtggtcaaagaccatgagacgatggggaggaacaggttcctgggggaagccaaggtcccactccgagaggtcctcgccacccctagtctgtccgccagcttcaatgcccccctgctggacaccaagaagcagcccacaggggcctcgctggtcctgcaggtgtcctacacaccgctgcctggagctgtgcccctgttcccgccccctactcctctggagccctccccgactctgcctgacctggatgtagtggcagacacaggaggagaggaagacacagaggaccagggactcactggagatgaggcggagccattcctggatcaaagcggaggcccgggggctcccaccaccccaaggaaactaccttcacgtcctccgccccactaccccgggatcaaaagaaagcgaagtgcgcctacatctagaaagctgctgtcagacaaaccgcaggatttccagatcagggtccaggtgatcgaggggcgccagctgccgggggtgaacatcaagcctgtggtcaaggttaccgctgcagggcagaccaagcggacgcggatccacaagggaaacagcccactcttcaatgagactcttttcttcaacttgtttgactctcctggggagctgtttgatgagcccatctttatcacggtggtagactctcgttctctcaggacagatgctctcctcggggagttccggatggacgtgggcaccatttacagagagccccggcacgcctatctcaggaagtggctgctgctctcagaccctgatgacttctctgctggggccagaggctacctgaaaacaagcctttgtgtgctggggcctggggacgaagcgcctctggagagaaaagacccctctgaagacaaggaggacattgaaagcaacctgctccggcccacaggcgtagccctgcgaggagcccacttctgcctgaaggtcttccgggccgaggacttgccgcagatggacgatgccgtgatggacaacgtgaaacagatctttggcttcgagagtaacaagaagaacttggtggacccctttgtggaggtcagctttgcggggaaaatgctgtgcagcaagatcttggagaagacggccaaccctcagtggaaccagaacatcacactgcctgccatgtttccctccatgtgcgaaaaaatgaggattcgtatcatagactgggaccgcctgactcacaatgacatcgtggctaccacctacctgagtatgtcgaaaatctctgcccctggaggagaaatagaagaggagcctgcaggtgctgtcaagccttcgaaagcctcagacttggatgactacctgggcttcctccccacttttgggccctgctacatcaacctctatggcagtcccagagagttcacaggcttcccagacccctacacagagctcaacacaggcaagggggaaggtgtggcttatcgtggccggcttctgctctccctggagaccaagctggtggagcacagtgaacagaaggtggaggaccttcctgcggatgacatcctccgggtggagaagtaccttaggaggcgcaagtactccctgtttgcggccttctactcagccaccatgctgcaggatgtggatgatgccatccagtttgaggtcagcatcgggaactacgggaacaagttcgacatgacctgcctgccgctggcctccaccactcagtacagccgtgcagtctttgacgggtgccactactactacctaccctggggtaacgtgaaacctgtggtggtgctgtcatcctactgggaggacatcagccatagaatcgagactcagaaccagctgcttgggattgctgaccggctggaagctggcctggagcaggtccacctggccctgaaggcgcagtgctccacggaggacgtggactcgctggtggctcagctgacggatgagctcatcgcaggctgcagccagcctctgggtgacatccatgagacaccctctgccacccacctggaccagtacctgtaccagctgcgcacccatcacctgagccaaatcactgaggctgccctggccctgaagctcggccacagtgagctccctgcagctctggagcaggcggaggactggctcctgcgtctgcgtgccctggcagaggagccccagaacagcctgccggacatcgtcatctggatgctgcagggagacaagcgtgtggcataccagcgggtgcccgcccaccaagtcctcttctcccggcggggtgccaactactgtggcaagaattgtgggaagctacagacaatctttctgaaatatccgatggagaaggtgcctggcgcccggatgccagtgcagatacgggtcaagctgtggtttgggctctctgtggatgagaaggagttcaaccagtttgctgaggggaagctgtctgtctttgctgaaacctatgagaacgagactaagttggcccttgttgggaactggggcacaacgggcctcacctaccccaagttttctgacgtcacgggcaagatcaagctacccaaggacagcttccgcccctcggccggctggacctgggctggagattggttcgtgtgtccggagaagactctgctccatgacatggacgccggtcacctgagcttcgtggaagaggtgtttgagaaccagacccggcttcccggaggccagtggatctacatgagtgacaactacaccgatgtgaacggggagaaggtgcttcccaaggatgacattgagtgcccactgggctggaagtgggaagatgaggaatggtccacagacctcaaccgggctgtcgatgagcaaggctgggagtatagcatcaccatccccccggagcggaagccgaagcactgggtccctgctgagaagatgtactacacacaccgacggcggcgctgggtgcgcctgcgcaggagggatctcagccaaatggaagcactgaaaaggcacaggcaggcggaggcggagggcgagggctgggagtacgcctctctttttggctggaagttccacctcgagtaccgcaagacagatgccttccgccgccgccgctggcgccgtcgcatggagccactggagaagacggggcctgcagctgtgtttgcccttgagggggccctgggcggcgtgatggatgacaagagtgaagattccatgtccgtctccaccttgagcttcggtgtgaacagacccacgatttcctgcatattcgactatgggaaccgctaccatctacgctgctacatgtaccaggcccgggacctggctgcgatggacaaggactctttttctgatccctatgccatcgtctccttcctgcaccagagccagaagacggtggtggtgaagaacacccttaaccccacctgggaccagacgctcatcttctacgagatcgagatctttggcgagccggccacagttgctgagcaaccgcccagcattgtggtggagctgtacgaccatgacacttatggtgcagacgagtttatgggtcgctgcatctgtcaaccgagtctggaacggatgccacggctggcctggttcccactgacgaggggcagccagccgtcgggggagctgctggcctcttttgagctcatccagagagagaagccggccatccaccatattcctggttttgaggtgcaggagacatcaaggatcctggatgagtctgaggacacagacctgccctacccaccaccccagagggaggccaacatctacatggttcctcagaacatcaagccagcgctccagcgtaccgccatcgagatcctggcatggggcctgcggaacatgaagagttaccagctggccaacatctcctcccccagcctcgtggtagagtgtgggggccagacggtgcagtcctgtgtcatcaggaacctccggaagaaccccaactttgacatctgcaccctcttcatggaagtgatgctgcccagggaggagctctactgcccccccatcaccgtcaaggtcatcgataaccgccagtttggccgccggcctgtggtgggccagtgtaccatccgctccctggagagcttcctgtgtgacccctactcggcggagagtccatccccacagggtggcccagacgatgtgagcctactcagtcctggggaagacgtgctcatcgacattgatgacaaggagcccctcatccccatccaggaggaagagttcatcgattggtggagcaaattctttgcctccataggggagagggaaaagtgcggctcctacctggagaaggattttgacaccctgaaggtctatgacacacagctggagaatgtggaggcctttgagggcctgtctgacttttgtaacaccttcaagctgtaccggggcaagacgcaggaggagacagaagatccatctgtgattggtgaatttaagggcctcttcaaaatttatcccctcccagaagacccagccatccccatgcccccaagacagttccaccagctggccgcccagggaccccaggagtgcttggtccgtatctacattgtccgagcatttggcctgcagcccaaggaccccaatggaaagtgtgatccttacatcaagatctccatagggaagaaatcagtgagtgaccaggataactacatcccctgcacgctggagcccgtatttggaaagatgttcgagctgacctgcactctgcctctggagaaggacctaaagatcactctctatgactatgacctcctctccaaggacgaaaagatcggtgagacggtcgtcgacctggagaacaggctgctgtccaagtttggggctcgctgtggactcccacagacctactgtgtctctggaccgaaccagtggcgggaccagctccgcccctcccagctcctccacctcttctgccagcagcatagagtcaaggcacctgtgtaccggacagaccgtgtaatgtttcaggataaagaatattccattgaagagatagaggctggcaggatcccaaacccacacctgggcccagtggaggagcgtctggctctgcatgtgcttcagcagcagggcctggtcccggagcacgtggagtcacggcccctctacagccccctgcagccagacatcgagcaggggaagctgcagatgtgggtcgacctatttccgaaggccctggggcggcctggacctcccttcaacatcaccccacggagagccagaaggtttttcctgcgttgtattatctggaataccagagatgtgatcctggatgacctgagcctcacgggggagaagatgagcgacatttatgtgaaaggttggatgattggctttgaagaacacaagcaaaagacagacgtgcattatcgttccctgggaggtgaaggcaacttcaactggaggttcattttccccttcgactacctgccagctgagcaagtctgtaccattgccaagaaggatgccttctggaggctggacaagactgagagcaaaatcccagcacgagtggtgttccagatctgggacaatgacaagttctcctttgatgattttctgggctccctgcagctcgatctcaaccgcatgcccaagccagccaagacagccaagaagtgctccttggaccagctggatgatgctttccacccagaatggtttgtgtccctttttgagcagaaaacagtgaagggctggtggccctgtgtagcagaagagggtgagaagaaaatactggcgggcaagctggaaatgaccttggagattgtagcagagagtgagcatgaggagcggcctgctggccagggccgggatgagcccaacatgaaccctaagcttgaggacccaaggcgccccgacacctccttcctgtggtttacctccccatacaagaccatgaagttcatcctgtggcggcgtttccggtgggccatcatcctcttcatcatcctcttcatcctgctgctgttcctggccatcttcatctacgccttcccgaactatgctgccatgaagctggtgaagcccttcagctgaggactctcctgccctgtagaaggggccgtggggtcccctccagcatgggactggcctgcctcctccgcccagctcggcgagctcctccagacctcctaggcctgattgtcctgccagggtgggcagacagacagatggaccggcccacactcccagagttgctaacatggagctctgagatcaccccacttccatcatttccttctcccccaacccaacgcttttttggatcagctcagacatatttcagtataaaacagttggaaccacaaaaaaaaaaaaaaaaaaaaaaaaa

SEQ ID NO: 1712 - DNA, 4152 bp, Homo sapiens
cccaggccggctctggcctcctgacccagacagcgcagggcgcgagggatcgcgcggccgagcccgggtcgcgccgctcccagcatcggggccgctagccaagagttcgaggccttcccgatccggatgtgatgaaaaagagcaacagagggagaagtgtttcaggattgtaggagtggaagaggggaaagagaggcagagagggggaaggccccctcgcaggggagccggctggagtgagctggctggaaagagggggcggagtgcgcggagtcagagccgccaccgctgccgcagttgccgccactgcggcgtctgggctgagccggagggaggcgggaggacgcgcaggggcggccgccgccgtcgtcaggccaccggggcgaaaatgcggccgctgccggaggctcgctaactttccggggcggaagaggaggaggaggaggaggaaggggcttggagcgactacggggggatgcggagaagcagtcagttccctgcacccagcacctcacagcccttcctccgtgcgccctgccgggcggcgagctaggcggcagcggcgcggcgcgggctcggcggagcggcccatgtccggcgcgggcgaagccctcgctcccgggcccgtggggccgcagcgcgtggccgaggcgggcggcggccagctgggctccacagcccagggaaaatgtgataaagacaatactgagaaagatataactcaagctaccaatagccacttcacacatggagagatgcaagaccagtccatttggggaaatccttcggatggtgaactcattagaacccaacctcagcgcttgcctcagcttcagacttcagcacaggtgccaagtggtgaggaaataggcaagataaagaacggccacacaggtctgagcaatggaaatggaattcaccacggggccaaacacggatccgcagataatcgcaaactttcagcacctgtttctcaaaaaatgcatagaaaaattcagtccagcttgtctgtaaacagcgatatcagtaagaagagcaaagtaaatgctgtcttttcccaaaagacaggctcttcacctgaagattgttgtgtccactgtatcctggcttgcttgttctgcgaattcctgaccctttgcaacattgtcctgggacaagcgtcatgtggcatctgcacctcagaagcctgctgctgttgctgtggtgacgagatgggggatgattgtaactgcccttgtgatatggactgtggcatcatggatgcctgttgtgaatcatcagactgcttggaaatctgtatggaatgctgtggaatttgttttccttcataaatatttatcttttgtttgtgttaaaactggagagtgtttaaaaatttccttttggggggaagaaaagcacattgtaagattctcatgaaacaacatggaatttgcactgttaactcattattgtaagtaatctctgaaagcctttttactttaaccaaatctacatggtttaatatgtgaaattttaactactttaactagttttataaatttcttaatatgttacaataacttagggacattttgacaccccccttcccaaatgttaaatgccttctcctttttaccgatatttctgtttcttttaaccgttctcaggagcactttgctccaaatatattatttttcagtgtgtatttaaacgaggcagtttattttgatatgtatctattcatgattgaaaggaagcagtcttggccaggcacggtggcttacacctgtaaccctggcattttgggaggccaaggtgggcagattgcctgagctcaggagttcgagaccagccagggcaacatggtgaaaccccatctctactaaaatacaaaaagttagctgggcttggcggtgtgcgcctgtagtcccagctactcaggaggctgaggcaggagaattgcttgaacccgagaggcggaagttgcagtgagccgagattgtgccactgaactccaacctgcactccagcctgggcaacagagcgagactccatctctaaataaataaataaataaataaataaataaataaataaataaataaacaaaccagtctttattttaaaagaaactttaggaaacaaacccacataatagttgggaaccagtgttgatctctctcccttaccttctccacttgttcaacagactctgaatgccgactgtgtggactctcttcctcagactgtggggacagatacaattccactcctgtccacaggaacatgagatttagcagactaaggagatctgtaaagaatgaaccataccacaaggcatactgaagtgaggattataagagaaataaactcaaaatgctgttggaatatgcagagaattgctaccagaatattcagtaaggtttcagggagaatgtggcatttgaggactctcttagaatgagtgattcacctgctatttaaatgaattatttagatttttgacaaagatttaggtggacaccctaaactgtgtgtgcctttaaccagttaaaagaacagtgccttcagcatacttttttattagttgtaggaatacagctttttgaaaaagctataaagtttaaattaactaaaaatatgcattttcttacacataatttaaatgttatcatacttttttgatgaaaacataatgccttagtaaaatagctctatttaataaagaagattgagtactctgacacatttcatttaaattaggaaatttttaatattaaaatcccagtgttctgagttattgaaaggctttcttttattttgagagctttaggtctttttgggatgagaacattttagttgtttagtttgtttcttaagcagtgctattttttgtaaacacagataaatggaaaccattcttttcaatgcagaagaaatctagatatcccctactgtgaccaaatttctgtattacgattttatgttaaattaaactaatatggcaggttataatgatccttaagtgtaaagaaatcagtcaattacaagagtaattgtatagttattgagacctatagtgtgtggcttagatgaaagggagagtaaattttcataccatgctctctcctactcagtttgatctctctaaaattgtagtttggtttgatttaatataattcttagtagaaattttgaaagtatgctttgggattaataattatttttaatttttctggctgaatatcaaattgatagtaacaacagaagcataattttaggaaggctttcgcaaacctagccttttaagagaggtttttaacctgaagcatgagaatatatcacctgtggtttttcctttgagatgaaacgtagtttctagttatatcattacttaaagggcttaaaaagaaaaaacttagcaaacttttgaatctttcttttattgctatttacacatacatacacacatacaaaacctttaaattttgggatctgaatataattctggtaaacagctgtcttcatttttctcctctaaagaacttaattcatttgttacataaaatataaggaaatctttatactattttacagtaaccacaatctaaatatttacatatacccaaaattaacttatgctcatatattaggatgtgagaatatcatctgtttatggacacatgaaacctcctaatgacctggaattgttagaatatttgactttttatatgcaaagtttttcaaccaagtggtttgtctaatatttaaacatgtactggcacaatttgtgatgaaaatattagcacatttgcaataatgtttctccataacagagaatgttaatggataccagaattttatttttgtatttatgttcatagtacttttcctcttgtctactccagacagttattccataaagcatttgtataattaaaaggaaaacagaaaaaggaaaagtaggcaaatgtgaaaatagtttcaatatatcttatgatttcttaatgtaaaatgttttgttgaagtatatggctatcatgactaagtgctagaatttatagttacaggcggtgtccttttaaatgtggaaaggcttttaaaatattttaaaactggacctgtattatcctgaatacactattttgaaaatttttaagaaaaaaaaaa

SEQ ID NO: 1713 - DNA, 3641 bp, Homo sapiens
ctgcactgaagagggagagcgagagagagactggagacgcacagatccccccaaggtctcccaagcctaccgtcccacagattattgtacagagccccaaaaatcgaaacagaggaaacgaacagcagttgaacatggacgaaggaattcctcatttgcaagagagacagttactggaacatagagattttataggactggactattcctctttgtatatgtgtaaacccaaaaggagcatgaaacgagacgacaccaaggatacctacaaattaccgcacagattaatagaaaagaaaagaagagaccgaattaatgaatgcattgctcagctgaaagatttactgcctgaacatctgaaattgacaactctgggacatctggagaaagctgtagtcttggaattaactttgaaacacttaaaagctttaaccgccttaaccgagcaacagcatcagaagataattgctttacagaatggggagcgatctctgaaatcgcccattcagtccgacttggatgcgttccactcgggatttcaaacatgcgccaaagaagtcttgcaatacctctcccggtttgagagctggacacccagggagccgcggtgtgtccagctgatcaaccacttgcacgccgtggccacccagttcttgcccaccccgcagctgttgactcaacaggtccctctgagcaaaggcaccggcgctccctcggccgccgggtccgcggccgccccctgcctggagcgcgcggggcagaagctggagcccctcgcctactgcgtgcccgtcatccagcggactcagcccagcgccgagctcgccgccgagaacgacacggacaccgacagcggctacggcggcgaagccgaggcccggccggaccgcgagaaaggcaaaggcgcgggggcgagccgcgtcaccatcaagcaggagcctcccggggaggactcgccggcgcccaagaggatgaagctggattcccgcggcggcggcagcggcggcggcccggggggcggcgcggcggcggcggcagccgcgcttctggggcccgaccctgccgccgcggccgcgctgctgagacccgacgccgccctgctcagctcgctggtggcgttcggcggaggcggaggcgcgcccttcccgcagcccgcggccgccgcggcccccttctgcctgcccttctgcttcctctcgccttctgcagctgccgcctacgtgcagcccttcctggacaagagcggcctggagaagtatctgtacccggcggcggctgccgccccgttcccgctgctataccccggcatccccgccccggcggcagccgcggcagccgccgccgccgctgccgccgccgccgccgcgttcccctgcctgtcctcggtgttgtcgccccctcccgagaaggcgggcgccgccgccgcgaccctcctgccgcacgaggtggcgccccttggggcgccgcacccccagcacccgcacggccgcacccacctgcccttcgccgggccccgcgagccggggaacccggagagctctgctcaggaagatccctcgcagccaggaaaggaagctccctgaatccttgcgtcccgaaggacggaggttcaagcagagtgagaagttaaaatacccttaaggaggttcaagcagagtgagaagttaaaatacccttaaggtctttaagggaggaagtgtaatagatgcacgacaggcataaacaagaacaacaaaacaggtgttatgtgtacattcggagttcctgttttgctcatcccgcaccaccccaccctccacacactaacatccctttcttccccccaccagctgtaaaagatcctatgcgaaagacactggctcttttttttaatcccccaaataaattttgcccccttttaggccatgttccattatctcttaaaattggaacctaattcgagaggaagtaagaagggtctgttctgtggctgagctaggtgaaccccggggtaggggaaagatgttaacacctttgacgtctttggagttgacatggaacagcaggtagttgttatgtagagctagttctcaaagctgccctgcctgttttaggaggcgttccacaaacagattgaggctctttttagaattgaatttactcttcagtattttctaatgttcagctttctaaaaggcatatatttttcaaagaagtgaggatgcagtttctcacgttgcaacctattctgaagtggtttaaatggtatctcttagtaacttgcactcgttaaagaaacacggagctgggccatcgtcagaactaagtcagggaaggagatggatgagaaggccagaatcattcctagtacatttgctaacactttattgagaaattgaccatgaattaatggactcatcttaatttcttctaagtccatatatagatagatatctatctgtacagatttctatttatccatagataggtatctatacatacacatctcaagtgcatctattcccactctcattaatccatcatgttcctaaatttttgtaatcttactgtaaaaaaaagtgcactgaacttcaaaacaaaacaaaaaacaacaacaacaaaaaacaagtccaaactgatatatcctatattctgttaaaattcaaaagtgaacgaaagcatttaactggccagttttgattgcaaatgctgtaaagatatagaatgaagtcctgtgaggccttcctatctccaagtctatgtattttctggagaccaaaccagataccagataatcacaaagaaagcttttttaataaggcttaaaccaagaccttgtctagatatttttagtttgttgccaaggtagcactgtgagaaatctcacttggatgttatgtaaggggtgagacacaacagtctgactatgagtgaggaaaatatctgggtcttttcgtcagtttggtgcatttgctgctgctgttgctactgtttgcctcaaacgctgtgtttaaacaacgttaaactcttagcctacaaggtggctcttatgtacatagttgttaatacatccaattaatgatgtctgacatgctatttttgtagggagaaaatatgtgctaatgatattttgagttaaaatatcttttggggaggatttgctgaaaagttgcacttttgttacaatgcttatgcttggtacaagcttatgctgtcttaaattattttaaaaaaattaaatactgtctgtgagaaaccagctggtttagaaaagtttagtatgtgacgataaactagaaattacctttatattctagtattttcagcactccataaattctattacctaaatattgccacactattttgtgatttaaaaattcttactaaggaataaaaactttaatatacgatatgatattgtctaataattaaaaaagacataatggatgctcaattagttttaagatatctataactatagggatacaaatcactacagttctcagatttacaccttttttttgtcattggcttgatgtcacacatttccaatctcttgcaagcctccaggctctggctttgtctacctgctcgttcccaatgtatcttaatgaaaagtgcaaaagaaaaacctaccaattaaaaaaaaaaaaaaaaaa

SEQ ID NO: 1714 - DNA, 1192 bp, Homo sapiens
cgcgccccccagtcccgcacccgttcggcccaggctaagttagccctcaccatgccggtcaaaggaggcaccaagtgcatcaaatacctgctgttcggatttaacttcatcttctggcttgccgggattgctgtccttgccattggactatggctccgattcgactctcagaccaagagcatcttcgagcaagaaactaataataataattccagcttctacacaggagtctatattctgatcggagccggcgccctcatgatgctggtgggcttcctgggctgctgcggggctgtgcaggagtcccagtgcatgctgggactgttcttcggcttcctcttggtgatattcgccattgaaatagctgcggccatctggggatattcccacaaggatgaggtgattaaggaagtccaggagttttacaaggacacctacaacaagctgaaaaccaaggatgagccccagcgggaaacgctgaaagccatccactatgcgttgaactgctgtggtttggctgggggcgtggaacagtttatctcagacatctgccccaagaaggacgtactcgaaaccttcaccgtgaagtcctgtcctgatgccatcaaagaggtcttcgacaataaattccacatcatcggcgcagtgggcatcggcattgccgtggtcatgatatttggcatgatcttcagtatgatcttgtgctgtgctatccgcaggaaccgcgagatggtctagagtcagcttacatccctgagcaggaaagtttacccatgaagattggtgggattttttgtttgtttgttttgttttgtttgttgtttgttgtttgtttttttgccactaattttagtattcattctgcattgctagataaaagctgaagttactttatgtttgtcttttaatgcttcattcaatattgacatttgtagttgagcggggggtttggtttgcttggtttatatttttcagttgtttgtttttgcttgttatattaagcagaaatcctgcaatgaaaggtactatatttgctagactctagacaagatattgtacataaaagaatttttttgtctttaaatagatacaaatgtctatcaactttaatcaagttgtaacttatattgaagacaatttgatacataataaaaaattatgacaatgaaaaaaaaaaaaaaaaaaaaaaagg

SEQ ID NO: 1715 - DNA, 2480 bp, Homo sapiens
atagttgaccagcttctgcaggggctcctcagtgagagaatggaggtgaggtcagggactcctgccttgcctctgccatcacttccagtgatgcctattcctaagattgatcgtgtcctgtgctgaagatgtttccggaacaacagaaagaggaatttgtaagtgtctgggttcgagatcctaggattcagaaggaggacttctggcattcttacattgactatgagatatgtattcatactaatagcatgtgttttacaatgaaaacatcctgtgtacgaagaagatatagagaattcgtgtggctgaggcagagactccaaagtaatgcgttgctggtacaactgccagaacttccatctaaaaacctgtttttcaacatgaacaatcgccagcacgtggatcagcgtcgccagggtctggaagatttcctcagaaaagtcctacagaatgcacttttgctttcagatagcagccttcacctcttcttacagagccatctgaattcagaagacattgaggcgtgtgtttctgggcagactaagtactctgtggaagaagcaattcacaagtttgccttaatgaatagacgtttccctgaagaagatgaagaaggaaaaaaagaaaatgatatagattatgattcagaaagttcatcctctgggcttggacacagtagtgatgacatcagttcacatggatgtaaagtaaatacagctccgcaggaatcctgaaaaataattctaatgttactatcttaggaatagcaaattatgtccagtcatagagaagaaagcttcataataatacattcttacctaaagctcactgtcatgatgttaggtatttaaattcttaaagatgttgggttgtttattagtggtatttttatgttgtcttattttaggtaagcttctgtgtaaagctaaaaatcctgtgaatacaatactatcctttacaggcagacattattggtaaacaagatcttgccctccaatgaaatgacttacatgttttaaaaaaccgagttggttttattgaatttaaaaagataggtaactaagtagcatttaaaatcaagatagagcattccttcttgtatcagtggggcagtgttaccataaacacggtgtatatgttgttaaaccctatgaagagtaacagtgtagaccagactgcctctctcagatatgtgcctgatattttgtggatacctcccctgcactggcaaaacactatgcttttgggtgttagactgaaatattttaagagtatttaacctttccagtattctgtttcacgcttagatggaaatgtatcttatgaatagagacatattaaaataatgtttacatcttagaaaaaacatagatagtgctagtaatattacttataactgtaatatatagattcagaaatacattttcattatccaaaatcagcttcaacaaatggtttctggagacaaataatttgttttcattatcattgtataatcaggttaatgatttattttttgactaaatgtgcaatttcttatcactagataactttcagtatcagtggtggttacttattacttaaatcagaggaaggattttataaagattaataaatttaattttaccaataaatattcccataatttagaaaaggatgtcgacttgctaatttcagaaataattattcatttttaaaaagccccttttaaagcatctacttgaagattggtataattttcataaaatgtctttttttttagtgtcccaaagatatcttagataaactattttgaagttcagatttcagatgaggcaacattttcttgagataattacccaagtttcatccatgttgaatggtacaaaatatttctgtgaaactaacaggaagatattttcagataactaggataacttgttgctttgttacccagcctaattgaagagtggcagaggctactacaaaaagcaaccttttcattttcactaagagtttaaaagctattgtattattaaaaagtctttacaatgcttgtttcaaagaaccaacagaaaaaaaagctaagaaaactgagaactaacattaaaaaaattaaatttagaataagaatgatttctttaatttgtcctttttttctttggtctaaaacattattaaatttttgtaaatattttgatttaatgtgtcttagatcctcattattttaatacaggaaaagaaaagatttagtaatttcttaccatgctaatatgtaaagttcatgccatccaggcatttaagagcgatcctcatcccttcagcaatatgtatttgagttcacactatttctgttttacagcagttttgaaaaacacatactatgccaccaattgtcatattatttttagatgatgtaacatagccatcaaaattaatattatgtaatgcctaatacttagtatgtaaatgtcacgagatcatttttacattaaacgtga

SEQ ID NO: 1716 - DNA, 1138 bp, Homo sapiens
gaattccgaagtacttggaagagatcgccacacagatgcgcaccagcatcaacgcgctgctgatcatcggtggattcgaggcctacctgggactcctggagctgtcagccgcccgggagaagcacgaggagttctgtgtccccatggtcatggttcccgctactgtgtccaacaatgtgccgggttccgatttcagcatcggggcagacaccgccctgaacactatcaccgacacctgcgaccgcatcaagcagtccgccagcggaaccaagcggcgcgtgttcatcatcgagaccatgggcggctactgtggctacctggccaacatgggggggctcgcggccggagctgatgccgcatacattttcgaagagcccttcgacatcagggatctgcagtccaacgtggagcacctgacggagaaaatgaagaccaccatccagagaggccttgtgctcagaaatgagagctgcagtgaaaactacaccaccgacttcatttaccagctgtattcagaagagggcaaaggcgtgtttgactgcaggaagaacgtgctgggtcacatgcagcagggtggggcaccctctccatttgatagaaactttggaaccaaaatctctgccagagctatggagtggatcactgaaaaactcaaggaggcccggggcagaggaaaaaaatttaccaccgatgattccatttgtgtgctgggaataagcaaaagaaacgttatttttcaacctgtggcagagctgaagaagcaaacggattttgagcacaggattcccaaagaacagtggtggctcaagctacggcccctcatgaaaatcctggccaagtacaaggccagctatgacgtgtcggactcaggccagctggaacatgtgcagccctggagtgtctgacccagtcccgcctgcatgtgcctgcagccaccgtggactgtgtctgtttgtaacacttaagttattttatcagcactttatgcacgtattattgacattgaatacctaatcggcgagtgcccatctgccccaccagctcccagtgcgtgctgtctgtggagtgtgtctcatgctttcagatgtgatatgagcagaattaattaaacatttgcctatgaaaaaaaaaaaaaaaa

SEQ ID NO: 1717 - DNA, 1814 bp, Homo sapiens
tgggtacccggagcacggagatctcgccggctttacgttcacctcggtgtctgcagcaccctccgcttcctctcctaggcgacgagacccagtggctagaagttcaccatgtctattctcaagatccatgccagggagatctttgactctcgcgggaatcccactgttgaggttgatctcttcacctcaaaaggtctcttcagagctgctgtgcccagtggtgcttcaactggtatctatgaggccctagagctccgggacaatgataagactcgctatatggggaagggtgtctcaaaggctgttgagcacatcaataaaactattgcgcctgccctggttagcaagaaactgaacgtcacagaacaagagaagattgacaaactgatgatcgagatggatggaacagaaaataaatctaagtttggtgcgaacgccattctgggggtgtcccttgccgtctgcaaagctggtgccgttgagaagggggtccccctgtaccgccacatcgctgacttggctggcaactctgaagtcatcctgccagtcccggcgttcaatgtcatcaatggcggttctcatgctggcaacaagctggccatgcaggagttcatgatcctcccagtcggtgcagcaaacttcagggaagccatgcgcattggagcagaggtttaccacaacctgaagaatgtcatcaaggagaaatatgggaaagatgccaccaatgtgggggatgaaggcgggtttgctcccaacatcctggagaataaagaaggcctggagctgctgaagactgctattgggaaagctggctacactgataaggtggtcatcggcatggacgtagcggcctccgagttcttcaggtctgggaagtatgacctggacttcaagtctcccgatgaccccagcaggtacatctcgcctgaccagctggctgacctgtacaagtccttcatcaaggactacccagtggtgtctatcgaagatccctttgaccaggatgactggggagcttggcagaagttcacagccagtgcaggaatccaggtagtgggggatgatctcacagtgaccaacccaaagaggatcgccaaggccgtgaacgagaagtcctgcaactgcctcctgctcaaagtcaaccagattggctccgtgaccgagtctcttcaggcgtgcaagctggcccaggccaatggttggggcgtcatggtgtctcatcgttcgggggagactgaagataccttcatcgctgacctggttgtggggctgtgcactgggcagatcaagactggtgccccttgccgatctgagcgcttggccaagtacaaccagctcctcagaattgaagaggagctgggcagcaaggctaagtttgccggcaggaacttcagaaaccccttggccaagtaagctgtgggcaggcaagcccttcggtcacctgttggctacacagacccctcccctcgtgtcagctcaggcagctcgaggcccccgaccaacacttgcaggggtccctgctagttagcgccccaccgccgtggagttcgtaccgcttccttagaacttctacagaagccaagctccctggagccctgttggcagctctagctttgcagtcgtgtaattggcccaagtcattgtttttctcgcctcactttccaccaagtgtctagagtcatgtgagcctcgtgtcatctccggggtggccacaggctagatccccggtggttttgtgctcaaaataaaaagcctcagtgacccatgaaaaaaaaaaaaaaaaaaaaaaaaaaaaaaaaaaaaaaaaaaaaaaa

SEQ ID NO: 1718 - DNA, 3832 bp, Homo sapiens
cgcgaggccggcgctgtgctcgcctcggagatcgctgctctttagctgggtgcagaaggcggctccgcggctcgcggacgactggctgggcgcgaatcagattggggggctttctcccggtcccctcccacctcgtctgggctcgcggcgtctccggggaaagccgtggccccgagggcggatccgagaacacacaagtgaaagacacaatgaatggtcatatttctaatcatcccagtagttttggaatgtacccatctcagatgaatggctacggatcatcacctaccttttcccagacggacagagaacatggttcaaaaacaagtgcaaaggccctttatgaacaaaggaagaattatgcacgggacagtgtcagcagtgtgtcagatatatctcaataccgtgttgaacacttgactacctttgtcctggatcggaaagatgctatgatcactgttgatgatggaataaggaaattgaaattgcttgatgccaagggcaaagtgtggactcaagatatgattcttcaagtggatgacagagctgtgagcctgattgatttagaatcaaagaatgaactggagaattttcctttaaacacaatccagcactgccaagctgtgatgcattcatgcagctatgattcagttcttgcactggtgtgcaaagagccaacccagaacaagccagatcttcatctcttccagtgtgatgaggttaaggcaaacctaattagtgaagatattgaaagtgcaatcagtgacagtaaaggagggaaacagaagaggcggcccgacgccctgaggatgatttccaatgcagaccctagtataccgcctccacccagagctcctgcccctgcgccccctgggaccgtcacccaggtggatgttagaagtcgagtggcagcctggtctgcatgggcagccgaccaaggggactttgagaaaccaaggcagtatcatgagcaggaagaaacacctgagatgatggcagcccgcattgacagagatgtgcaaatcttaaaccacattttggatgacattgaattttttatcacaaaactccaaaaagcagcagaagcattttctgagctttctaaaaggaagaaaaacaagaaaggtaaaaggaaaggaccaggagagggtgttttaacgctgcgggcaaaacctccacctcctgatgaatttcttgactgtttccaaaagtttaaacacggatttaaccttctggccaaactgaagtctcatattcagaatcctagtgctgcagatttggttcactttttgtttactccattaaatatggtggtgcaggcaacaggaggtcctgaactagccagttcagtacttagtcccctattgaataaggacacaattgatttcttaaattatactgtcaatggtgatgaacggcagctgtggatgtcattgggaggaacttggatgaaagccagagcagagtggccaaaagaacagtttattccaccatatgttccacgattccgcaatggctgggagcccccaatgctgaactttatgggagccacaatggaacaagatctttatcaactggcagaatctgtggcaaatgtagcagaacatcagcgcaaacaggaaataaaaagattatccacagagcattccagtgtatcagagtatcatccagccgatggctatgcgttcagtagcaacatttacacaagaggatcccacctggaccaaggggaagctgctgttgcttttaagccaacttctaatcgccatatagatagaaattatgaaccactcaaaacacaacccaagaaatatgccaaatccaagtatgactttgtagcaaggaacaacagtgagctctcggttctaaaggatgatattttagagatacttgatgatcggaagcaatggtggaaagttcgaaatgcaagtggagactctggatttgtgccaaataacattttggatattgtgagacctccagaatctggattggggcgtgctgatccaccttatactcatactatacagaaacaaaggatggagtatggcccaagaccagctgatactccccctgctccatcacctcctccaacaccagctcctgttcctgttccccttcccccttccactccagcacctgttcctgtgtcaaaggtcccagcaaatataacacgtcaaaacagcagctccagtgacagtggtggcagtatcgtgcgagacagccagagacacaaacaacttccggtggaccgaaggaaatctcagatggaggaagtgcaagatgaactcatccacagactgaccattggtcggagtgccgctcagaagaaattccatgtgccacggcagaacgtgccagttatcaatatcacttacgactccacaccagaggatgtgaagacgtggttacagtcaaagggattcaaccctgtgactgtcaatagtcttggagtattaaatggtgcacaacttttctctctcaataaggatgaactgaggacagtctgccctgaaggggcgagagtctatagccaaatcactgtacaaaaagctgcattggaggatagcagtggcagctccgagttacaagaaattatgagaagacgacaggaaaaaatcagtgctgccgctagtgattcaggagtggaatcttttgatgaaggaagcagtcactaatttgtttgtttgtatttaaactccattgtttttggcattattccaacatgctttgttttaagaagccttgaagggaatgtcagattcatttttcttgatgtaatttatcaccataaaaaaaaaacccatgcaaacctgagtgagcacaggatttgcttctaggcccattatttttattaaaactgaaaaaatttaaactgaattttttgaccttggaaaatatttttcttactttaccaaggtgaagtttccttaattagactaattattttatccccatcccagggtataaacaggaattgttttgatagtggtggagttattcactgcaacaaagcaacaatgttgtccatgattcaaaatctaagcagtttcgattttgcctgtgaatatggtgtctgtcattcagggcatagctcactgtaggctagcctctgcttacttaagtctcttctctgacatactcaatggaagaatatttagatttatttaaagttcttaatgccaacagtttaaaaaaaaattaaaacatttgaatgaactgtaaagtacagccataccttggacatgcaaatataaatctatggagcattctcaagacagtttgtcatggctctgttgattgcaactccttgtatagcttgtattttgatttagtttatattctgcttattatgtatactgtgttcttatatatgagaaagcacaaatgcgaaagaggtcatgtcttctcaaaatctagcaaaggaagtagtctgcattggtgtgcattacagtattttgcttaatgaaagcctcagttctgaatgttgatatgagtagttaaaaggaagtggggccattttatgtgtttatctgtgtcaagtatttctggtaataagaagcacttaatttacacatattttaatcctgtgaaagattccacatagagaaaagaaagatacctaaccttcaacaaatgttatttttggaaacacaatttttgtcattaaatgttatattatttcacatatataaaacagatgttatgtaagaatgttgtatattttaacataaatcatttagagaaattatctagattcattaattttcatagtgcctttttcacatgagtcagctggaaagtctgcaataaacagtatttgctgtctgtt

SEQ ID NO: 1719 - DNA, 1763 bp, Homo sapiens
gcactggactgagaaccttcaccaaaaaaatgtctgcccagagacagatgaggtccttcagctccagtgctgattggttcttttccaaaggcccatctaatcctaccacgcacggaaatatccacaggtttttattctttctgccagctacatcagatccatcaggtccgagctgagttgactaccactacttttccctttgtctcaattatgtcttggaagaaggctttgcggatccccggaggccttcgggcaccaactgtgaccttgatgctggcgatgctgagcaccccagtggctgagggcagagaccctcccgaggatttcgtgctccagtttaaggccatgtgctacttcaccaatgggacggagcgcgtgcgttatgtgaccagatacatctataaccgagaggaggacgtgcgcttcgacagcgacgtgggggtgtatcgggcggtgacggcgcaggggcggcctgacgccgagtactggaacagccagaaggacatcctggagaggacccgagcggagttggacacggtgtgcagacacaactacgaggtggcgttccgcgggatcttgcagaggagagtggagcccacagtgaccatctccccatccaggacagaggccctcaaccaccacaacctgctggtctgctcggtgacagatttctatccaggccagatcaaagtccggtggtttcggaatgaccaggaggagacagctggcgttgtgtccaccccccttattaggaacggtgactggaccttccagatcctggtgatgctggaaatgactccccagcatggagacgtctacacctgccacgtggagcaccccagcctccagagccccatcaccgtggagtggcgggctcagtctgaatctgcccagaacaagatgctgagtggcattggaggcttcgtgctggggctgatcttcctcgggctgggccttatcatccgtcaaaggagtcagaaaggacctcaagggcctccaccagcagggcttctgcactgactcctgagactattttaactaggattggttatcactcttctgtgatgcctgcttgtgcctgcccagaattcccagctgcctgtgtcagcttgtcccccgagatcaaagtcctacagtggctgtcacgcagccaccaggtcatctcctttcatccccaccccaaggcgctggctgtgactctgcttcctgcactgacccagagcctctgcctgtgcacggccagctgcgtctactcaggtcccaaggggtttctgtttctattctctcctcagactgctcaagagaagcacatgaaaaacattacctgactttagagcttttttacataattaaacatgatcctgagttaaaaaaaaaaaaggaaatcgctgcagaatgaaggaatatcccttgaggtgacccagccaacctgtggccagaaggagggttgtaccttgaaaagaccactgaaagcattttggggtgtcaagtaagggtgggcagaggaggtagaaaatcaattcaattgtcgcatcattcatggttctttaatattgatgctcagtgcattggccttagaatatcccagcctctcttctggtttggtgagtgctgtgtaagtaagcatggtagaattgtttggagacatatatagtgatccttggtcactggtgtttcaaacattctggaaagtcacatcgatcaagaatattttttatttttaagaaagcataaccagcaataaaaatactatttttgagtct

SEQ ID NO: 1720 - DNA, 4490 bp, Homo sapiens
cacgcgtccgcgagtagcggagcgggacccgctgatgctcaccccatttagagaaagaaatccacctccccaaccccaatcaagaacctgctattgtatatcatcatagagccagattacctagggaatcatcatccagggacgtgccagaaaccacaagaaaacatggggagggttttcctcacgggagaaaaagccaattccatattaaaacgctacccaagagctaatgggttttttgaagaaataagacagggcaacattgagcgtgagtgcaaagaagaattctgtacatttgaagaagcaagagaagcttttgaaaataatgaaaaaactaaggagttttggagcacctacacaaaagcgcaacaaggggagagtaaccgaggaagtgactggtttcagttttaccttacctttccgttaatctttggcctcttcattatcctccttgtcattttcctaatctggagatgcttcctaagaaacaaaactcgtagacagacagtgactgaaggccacattcctttccctcagcaccttaatattatcaccccaccccccccaccagatgaagtgtttgacagcagtggattgtctccaggctttctgggatatgtagttgggcgctcagattccgtctctactcgcctgtccaattgtgatcccccgccaacctatgaggaagccactggccaagtgaacctgcagaggagtgaaacagaacctcatttagacccacccccagagtatgaggacatagtcaactccaactcagccagtgccattcctatggtgcctgtggtcaccaccatcaaatgaagctgcaaacttctttttactctaatcatttttaaaatactaatggaagaactttctagcactttaccactacataaatgttcattgacttattttattggactcttaccgcataccacttcacacttgttttattttctttagttttgtttcttgttatagaatcattatccatgctcatttttgctaggggaaatatatgaagagggaaaacatactaatgggggtctttctgtgatgtgatgagacatacatgtaagtgtatatatgtgtgtataggcatatatacgtgtgtatgcatcaacacagtatatgtaaaactgtcttaaaaatccattaacttctacctaaatcacctggaaggagagcattactcaccaaaattgcaaaacaagggtatcaagaatttgtgtaatagccagtgacatgctgtagatttttgcaaactggatgtacttagcatgttttctaattctgactggcttttgttaacttgataattcttcatctaccttaaaaagaaaaaaattacacatagtcattcttgatgttataaatagagaaaaagtgtgtgtgagcaataatgcataagctactgataacttgcttacagcagatagcaataaggtatttggtggcattcggcttgttttgtaatagggattttttttttggttgaccactcccccacacttccaaaattaaacagtgttttcttagcatcttgaatatctcctgcggtgtatattaacatcttgatgagacagatttccaggcaacaaaataatttctaaaatggatatatgtgtggattaatgacaggcagtaaatacccattactcctttactcatagctggtaaaattattcccactgttttattgccttttactgtacgttctacactctgtcctactcccacagaattttcaagcccttaagagtttagttaaaataaaatttttgaaattattgtcttaatatttttatataggctgatgtctttgcctcaagattgttaggaggtaattttccattgaattatcaactgtgatttttatattgccctccaagtggtagaagaagattgcaaagtccatgttatgctaggtgcacaataaatctagtaatagccccacacagatctcatcattgttgctacttccttttgtattttcatcaggtatttttttaactgtagggtttttacttttttcttggagcagagagaacaggctgtaaatgggttgccaacataagctggctgagaaataaaagaaaacaagacagttgttcataaagtttcattttgtatgcactgatggcaaattcattaggtcagttaagggaaatatttgtaccacttccaaacttttcagcgttggataaaatgattgatgaggcaggcagaaggaatgtaggtttcaggtgtgtcatttcctgctgcttccagctccatccctacagactcctccccgagtcctgccctggaaccaaaggaaggaggaacactgaggggaatcctgaagtaggagtcagatgacctgaactcagatctccctctatcacatgcttgccaccactgtaccttgagcaagaatcatatctgaccctcaacctcctcaactctaaaatggggataacatcatttgtcctgcacttctctaagggctttacaaggatcaaataagatggtgtgtatgtaagaaatttgtaaaatgtgaagagctatctacactaagttcgtaatgttattattattgtgcttcatggagaattttcccctctgttttcctaaattgtatgagagctttcacacagtgagaaatagagcaggctgccccataaatgggtaacatattcctaatctgagtgtgtgggctgttagagaacccctgccatgctctggtctgttctgaaactgtgccaactgaaagatgatagtccacacagcacaaacaggtttaagcaaatgatagaaagggaagtaaggcgtgtgtgctagttaataggtttagtagcttttatggactaaaaatgattgattgtatcttgaccctggtctcagaaatgacatttttacttttgccatgagtacacatcagatatctttggcttctatttaaagctaaaggtagaagtgtttgatccagtgaactgtgtatgtatgtgtggggtttttttctttatttttaaatgaaaattaagacaccttttgtgtggacatgtttttgtctttaatgtcaggctttagattagaccagcagttttcaaagtatggccaatggacccctgggttccttgagagcctttcaggggggactatgagatcaaaatatttttattataatgtgaagacattgtcttttcactctatctcaaaaaaagtgttgcaaatgtaaaacattgccatcttctcacaaatctctttttttgtttttgaaaatatggccatttttcataaaatgttatttgtgttagcatgtaatgggtttactatgtttaaataagttaatactttaaaaattttcaggtttttttagtatggtgaatattgatagatataaacctcatgaacaaaagtactttggcatccagattctcaataaatgttaagagcgtaagtgtaagggggtccagagaccaaaagttttagagctacaggattagacataggagcaggatattctgttagtgtgatttcttgcaactttattttatattttaaactgctgatattggatataatgctgctttttagagacacctaaattgcagtatcagaatgaatgttgatgtttgaagccaaaaagccaaatgcttaaactgatcaatgactgtagctttttagactgttggtcaaagaacattctacttcacagtaatagctctatcagccacagatctcatggtggctgttgcatgataatgataggataaacaaaataccactgtcttcaagaaacattatcttaggtttgtttgtttggtttgagtttgatttggcttttatattttttaaaatcccttttgctaccccatctggttttataaactgagtttcttagcattcgttaaaattaaggggtttgtttggaataatatatattttttatgcttttgtctttcttacctgattgatattacattcacctttgattgttttttaaaagtttatttttacagaatatatttagtacctttcttaaggagtaactgaattgaatcaaccagtttgcatttaaataaaagaacaggctcagtggtcttcctgtagaatggtttacatgcctgcatgtgcagtagttgtgtctggaatcctagaattggcactttctgcctccttgctctaaatgtcacaaaaaattatacttccttaaagtaaatgtaatgatttcttcttttcctattgaccagtacagatagatatgttgtgtttgcttcatttttaatgatgacttcaagattgatgatgtgatccaataactgtggaggtagctttaacttggttctgtgtaaatagtatgtattttattataatatttctcattttaagatgcttggtttacattaaattatggtatttaactatttttatgtttatactaggtagggtctttcttatgtttctgtgtttttggtatgctaaataaagctatttttaaaccc

SEQ ID NO: 1721 - DNA, 1561 bp, Homo sapiens
ggcccgctccaacatcagaatggtaacagctttcaggagcctaccacgcggcagctccggagctgccgcgtccatgtccgcgcacaatcggggcaccgagctcgaccttagctggatctccaaaatacaagtgaatcacccggcagttctgaggcgtgcggaacaaatccaggctcgcagaaccgtgaaaaaggagtggcaggctgcttggctcctgaaagctgttacctttatagatcttactacactttcaggtgatgatacatcttccaacattcaaaggctctgttataaagccaaatacccaatccgggaagatctcttaaaagctttaaatatgcatgataaaggcattactacagccgccgtttgtgtttatcccgcccgggtgtgtgatgctgtaaaagcactcaaggctgcaggctgtaatatccctgtggcatcagtggccgctggatttccagctggacagactcatttgaagacacgattagaagagatcagattggctgtggaagatggagctacagaaatcgacgtggtaattaacagaagcttggtgctgacaggccagtgggaagccctgtatgatgagattcgtcagtttcgcaaggcctgtggggaggctcatcttaaaactatattagcgacaggagaacttggaactcttactaatgtctataaagccagtatgatagcaatgatggcaggatcagattttattaagacctctactggaaaagaaacagtaaatgccaccttcccggtagctatagtaatgctgcgggccattagagatttcttctggaaaactggaaacaagatagggtttaaaccagcaggaggcatccgcagtgcaaaggattcccttgcttggctctctcttgtaaaggaggagcttggagatgagtggctgaagccagaactctttcgaataggtgccagtactctgctctcggacattgagaggcagatttaccatcatgtgactggaagatatgcagcttatcatgatcttccaatgtcttaaatcagtcaccagttccagaaaagttctttacgacaatgtttaaaaattatttttctacgtaattgctaaaattatttaattaaaaaattgggcagtaggtaactggcattcctctctttaaaatttctaccgaacttaatggaatggaaaaagcaaactcatccacatgtggtactcatttcaggcacatctgaaatgatcttaattactagaagatctgcactattaactttgtgaagagtttctcctaaaaactttaagtaaaatgttaatggtagctttgataacatcaaattctaagggagaaaaaaacaatattaaaccgcccaagcagtgtgccctagcagaggaaaatgcaacatctcgcaagcgctgctgtaacgacttcaggagtcactgattcagcactaatttcctgctgtgaaaactcatctttcatttttgccgtggataggcgcttttattaattgttgtcctaatgaaatttctgacattgtcatatacaacgatgaatatcattaaaatttttaa

SEQ ID NO: 1722 - DNA, 4000 bp, Homo sapiens
aagcttactctctggcaccaaactccatgggatgatttttccttcctagaagagtccaggtggacaggtaaggagtgggagtcagggagtccagttccagggacagagattacgggataaaaagtgaaaggagagggacggggcccatgccgagggtttctcccttgtttctcagacagctcttgggccaagactcagggagacattgagacagagcgcttggcacagaagcagaggggtcagggcgaagtccagggccccaggcgttggctctcagggtctcaggccccgaaggcggtgtatggattggggagtcccagccttggggattccccaactccgcagtttcttttctccctctcccaacctatgtagggtccttcttcctggatactcacgacgcggacccagttctcactcccattgggtgtcgggtttccagagaagccaatcagtgtcgtcgcggtcgcggttctaaagtccgcacgcacccaccgggactcagattctccccagacgccgaggatggccgtcatggcgccccgaaccctcgtcctgctactctcgggggctctggccctgacccagacctgggcgggtgagtgcggggtcgggagggaaacggcctctgtggggagaagcaacgggccgcctggcgggggcgcaggacccgggaagccgcgccgggaggagggtcgggcgggtctcagccactcctcgtccccaggctctcactccatgaggtatttcttcacatccgtgtcccggcccggccgcggggagccccgcttcatcgcagtgggctacgtggacgacacgcagttcgtgcggttcgacagcgacgccgcgagccagaggatggagccgcgggcgccgtggatagagcaggagggtccggagtattgggacggggagacacggaaagtgaaggcccactcacagactcaccgagtggacctggggaccctgcgcggctactacaaccagagcgaggccggtgagtgaccccggcccggggcgcaggtcacgacctctcatcccccacggacgggccaggtcgcccacagtctccgggtccgagatccgccccgaagccgcgggaccccgagacccttgccccgggagaggcccaggcgcctttacccggtttcattttcagtttaggccaaaaatccccccaggttggtcggggcggggcggggctcgggggaccgggctgaccgcggggtccgggccaggttctcacaccgtccagaggatgtatggctgcgacgtggggtcggactggcgcttcctccgcgggtaccaccagtacgcctacgacggcaaggattacatcgccctgaaagaggacctgcgctcttggaccgcggcggacatggcagctcagaccaccaagcacaagtgggaggcggcccatgtggcggagcagttgagagcctacctggagggcacgtgcgtggagtggctccgcagatacctggagaacgggaaggagacgctgcagcgcacgggtaccaggggccacggggcgcctccctgatcgcctgtagatctcccgggctggcctcccacaaggaggggagacaattgggaccaacactagaatatcgccctccctctggtcctgagggagaggaatcctcctgggtttccagatcctgtaccagagagtgactctgaggttccgccctgctctctgacacaattaagggataaaatctctgaaggaatgacgggaagacgatccctcgaatactgatgagtggttccctttgacacacacaggcagcagccttgggcccgtgacttttcctctcaggccttgttctctgcttcacactcaatgtgtgtgggggtctgagtccagcacttctgagtccttcagcctccactcaggtcaggaccagaagtcgctgttccctcttcagggactagaatttccacggaataggagattatcccaggtgcctgtgtccaggctggtgtctgggttctgtgctcccttccccatcccaggtgtcctgtccattctcaagatagccacatgtgtgctggaggagtgtcccatgacagatcgaaaatgcctgaatgatctgactcttcctgacagacgcccccaaaacgcatatgactcaccacgctgtctctgaccatgaagccaccctgaggtgctgggccctgagcttctaccctgcggagatcacactgacctggcagcgggatggggaggaccagacccaggacacggagctcgtggagaccaggcctgcaggggatggaaccttccagaagtgggcggctgtggtggtgccttctggacaggagcagagatacacctgccatgtgcagcatgagggtttgcccaagcccctcaccctgagatggggtaaggagggagacgggggtgtcatgtcttttagggaaagcaggagcctctctgacctttagcagggtcagggcccctcaccttcccctcttttcccagagccgtcttcccagcccaccatccccatcgtgggcatcattgctggcctggttctctttggagctgtgatcactggagctgtggtcgctgctgtgatgtggaggaggaagagctcaggtggggaaggggtgaagggtgggtctgagatttcttgtctcactgagggttccaagacccaggtagaagtgtgccctgcctcgttactgggaagcaccacccacaattatgggcctacccagcctgggccctgtgtgccagcacttactcttttgtaaagcacctgttaaaatgaaggacagatttatcaccttgattacagcggtgatgggacctgatcccagcagtcacaagtcacaggggaaggtccctgaggaccttcaggagggcggttggtccaggacccacacctgctttcttcatgtttcctgatcccgccctgggtctgcagtcacacatttctggaaacttctctgaggtccaagacttggaggttcctctaggaccttaaggccctgactcttttctggtatctcacaggacattttcttcccacagatagaaaaggagggagctactctcaggctgcaagtaagtatgaaggaggctgatgcctgaggtccttgggatattgtgtttgggagcccatgggggagctcacccaccccacaattcctcctctagccacatcttctgtgggatctgaccaggttctgtttttgttctaccccaggcagtgacagtgcccagggctctgatgtgtctctcacagcttgtaaaggtgagagcctggagggcctgatgtgtgttgggtgttgggcggaacagtggacacagctgtgctatggggtttctttccattggatgtattgagcatgcgatgggctgtttaaagtgtgacccctcactgtgacagatacgaatttgttcatgaatatttttttctatagtgtgagacagctgccttgtgtgggactgagaggcaagagttgttcctgcccttccctttgtgacttgaagaaccctgactttgtttctgcaaaggcacctgcatgtgtctgtgttcgtgtaggcataatgtgaggaggtggggagaccaccccacccccatgtccaccatgaccctcttcccacgctgacctgtgctccctccccaatcatctttcctgttccagagaggtggggctgaggtgtctccatctctgtctcaacttcatggtgcactgagctgtaacttcttccttccctattaaaattagaacctgagtataaatttactttctcaaattcttgccatgagaggttgatgagttaattaaaggagaagattcctaaaatttgagagacaaaataaatggaacacatgagaaccttccagagtccacgtgttgcttatgctgatttgttgcaggggaggagagtagatggggctgtgcccagtttctgttccggccactatgggctttatgtggtcactgcttggctgggtcatctttgctgctccattgtccttgg

SEQ ID NO: 1723 - DNA, 2575 bp, Homo sapiens
gcgtcgacagcaggacaagctcagcctgcagctgccgtgggctttgtgtggactggacgcagagcttgggagacgggggagggctattactccaattcactgtcaatggaattacagctatagcggcagtgtatataggattgctttttctcgtcttcctgggttctgaagtaacggaagctaccttgtataaagacctcaacactgctgaccatgatcagcgcagcctggagcatcttcctcatcgggactaaaattgggctgttccttcaagtagcacctctatcagttatggctaaatcctgtccatctgtgtgtcgctgcgatgcgggtttcatttactgtaatgatcgctttctgacatccattccaacaggaataccagaggatgctacaactctctaccttcagaacaaccaaataaataatgctgggattccttcagatttgaaaaacttgctgaaagtagaaagaatatacctataccacaacagtttagatgaatttcctaccaacctcccaaagtatgtaaaagagttacatttgcaagaaaataacataaggactatcacttatgattcactttcaaaaattccctatctggaagaattacatttagatgacaactctgtctctgcagttagcatagaagagggagcattccgagacagcaactatctccgactgcttttcctgtcccgtaatcaccttagcacaattccctggggtttgcccaggactatagaagaactacgcttggatgataatcgcatatccactatttcatcaccatctcttcaaggtctcactagtctaaaacgcctggttctagatggaaacctgttgaacaatcatggtttaggtgacaaagttttcttcaacctagttaatttgacagagctgtccctggtgcggaattccctgactgctgcaccagtaaaccttccaggcacaaacctgaggaagctttatcttcaagataaccacatcaatcgggtgcccccaaatgctttttcttatctaaggcagctctatcgactggatatgtccaataataacctaagtaatttacctcagggtatctttgatgatttggacaatataacacaactgattcttcgcaacaatccctggtattgcgggtgcaagatgaaatgggtacgtgactggttacaatcactacctgtgaaggtcaacgtgcgtgggctcatgtgccaagccccagaaaaggttcgtgggatggctattaaggatctcaatgcagaactgtttgattgtaaggacagtgggattgtaagcaccattcagataaccactgcaatacccaacacagtgtatcctgcccaaggacagtggccagctccagtgaccaaacagccagatattaagaaccccaagctcactaaggatcaccaaaccacagggagtccctcaagaaaaacaattacaattactgtgaagtctgtcacttctgataccattcatatctcttggaaacttgctctacctatgactgctttgagactcagctggcttaaactgggccatagcccggcatttggatctataacagaaacaattgtaacaggggaacgcagtgagtacttggtcacagccctggagcctgattcaccctataaagtatgcatggttcccatggaaaccagcaacctctacctatttgatgaaactcctgtttgtattgagactgaaactgcaccccttcgaatgtacaaccctacaaccaccctcaatcgagagcaagagaaagaaccttacaaaaaccccaatttacctttggctgccatcattggtggggctgtggccctggttaccattgcccttcttgctttagtgtgttggtatgttcataggaatggatcgctcttctcaaggaactgtgcatatagcaaagggaggagaagaaaggatgactatgcagaagctggcactaagaaggacaactctatcctggaaatcagggaaacttcttttcagatgttaccaataagcaatgaacccatctcgaaggaggagtttgtaatacacaccatatttcctcctaatggaatgaatctgtacaaaaacaatcacagtgaaagcagtagtaaccgaagctacagagacagtggtattccagactcagatcactcacactcatgatgctgaaggactcacagcagacttgtgttttgggttttttaaacctaagggaggtgatggtaggaaccctgttctactgcaaaacactggaaaaagagactgaaaaaaagcaatgtactgtacatttgccatataatttatatttaagaactttttattaaaagtttcaaatttcaggttactgctgcgattgatgtagtggagatgcctgaacacaattctatattttagtattttttagtaatttgtactgtattttccttgcaaatattggagttataaaccatttactttgtgttctactgagtaagatgacttgttgactgtgaaagtgaattttcttgctgtgtcgaacaatcaggactgcattcatatgagatccttgtagtataagcacaggccatttttcagt

SEQ ID NO: 1724 - DNA, 756 bp, Homo sapiens
cggacttggcttgttagaaggctgaaagatgatggcaggaatgaaaatccagcttgtatgcatgctactcctggctttcagctcctggagtctgtgctcagattcagaagaggaaatgaaagcattagaagcagatttcttgaccaatatgcatacatcaaagattagtaaagcacatgttccctcttggaagatgactctgctaaatgtttgcagtcttgtaaataatttgaacagcccagctgaggaaacaggagaagttcatgaagaggagcttgttgcaagaaggaaacttcctactgctttagatggctttagcttggaagcaatgttgacaatataccagctccacaaaatctgtcacagcagggcttttcaacactgggagttaatccaggaagatattcttgatactggaaatgacaaaaatggaaaggaagaagtcataaagagaaaaattccttatattctgaaacggcagctgtatgagaataaacccagaagaccctacatactcaaaagagattcttactattactgagagaataaatcatttatttacatgtgattgtgattcatcatcccttaattaaatatcaaattatatttgtgtgaaaatgtgacaaacacacttatctgtctcttctacaattgtggtttattgaatgtgtttttctgcactaatagaaattagactaagtgttttcaaataaatctaaatcttcaaaaaaaaaaaaaaaaaatggggccgcaatt

SEQ ID NO: 1725 - DNA, 1989 bp, Homo sapiens
gcggccgccgggactcttcctggagacaccgccatggccgggctatcccgcgggtccgcgcgcgcactgctcgccgccctgctggcgtcgacgctgttggcgctgctcgtgtcgcccgcgcggggtcgcggcggccgggaccacggggactgggacgaggcctcccggctgccgccgctaccaccccgcgaggacgcggcgcgcgtggcccgcttcgtgacgcacgtctccgactggggcgctctggccaccatctccacgctggaggcggtgcgcggccggcccttcgccgacgtcctctcgctcagcgacgggcccccgggcgcgggcagcggcgtgccctatttctacctgagcccgctgcagctctccgtgagcaacctgcaggagaatccatatgctacactgaccatgactttggcacagaccaacttctgcaagaaacatggatttgatccacaaagtcccctttgtgttcacataatgctgtcaggaactgtgaccaaggtgaatgaaacagaaatggatattgcaaagcattcgttattcattcgacaccctgagatgaaaacctggccttccagccataattggttctttgctaagttgaatataaccaatatctgggtcctggactactttggtggaccaaaaatcgtgacaccagaagaatattataatgtcacagttcagtgaagcagactgtggtgaatttagcaacacttatgaagtttcttaaagtggctcatacacacttaaaaggcttaatgtttctctggaaagcgtcccagaatattagccagttttctgtcacatgctggtttgtttgcttgcttgtttacttgcttgtttaccaatagagttgacctgttattggatttcctggaagatgtggtagctacttttttcctattttgaagccattttcgtagagaaatatccttcactataatcaaataagttttgtcccatcaattccaaagatgtttccagtggtgctcttgaagaggaatgagtaccagttttaaattgcccattggcatttgaaggtagttgagtatgtgttctttattcctagaagccactgtgcttggtagagtgcatcactcaccacagctgcctcctgagctgcctgagcctggtgcaaaaggattggcccccattatggtgcttctgaataaatcttgccaagatagacaaacaatgatgaaactcagatggagcttcctactcatgttgatttatgtctcacaatcctgggtattgttaattcaacatagggtgaaactatttctgataaagaacttttgaaaaactttttatactctaaagtgatactcagaacaaaagaaagtcataaaactcctgaatttaatttccccacctaagtcgagacagtattatcaaaacacatgtgcacacagattattttttggctccaaaactggattgcaaaagaaagaggagaagaatattttgtgtgttcctggtattcttttataagtaaagtttacccaggcatggaccagcttcagccagggacaaaatcccctcccaaaccactctccacagctttttaaaaatacttctactcttaacaattacctaaggcttcctcaactgccccaaatctcttaatagcttctagtgctgctacaatctaagtcaggtcaccagagggaagagaacatggcattaaaagaatcacatcttcagaagagaagacactaatattattacccatatacatgatttcagaagatgacataagattcctcttaaagaggaaatgtcaggaatcaagccactgaatccttaaagagaaaagttgaatatgagtcattgtgtctgaaaactgcaaagtgaacttaactgagatccagcaaacaggttctgtttaagaaaaataatttatactaaatttagtaaaatggacttcttattcaaagcatcaataattaaaagaattattttaaaaaaaaaaaaaaa

SEQ ID NO: 1726 - DNA, 862 bp, Homo sapiens
ggctactaggagaaggacgtacggtcctgctagtagaggaatatgtcgagtttctctagggcgccccagcaatgggccacttttgctagaatatggtatctcttagatgggaaaatgcagccacctggcaaacttgctgctatggcatctataagacttcagggattacataaacctgtgtaccatgcactgagtgactgtggggatcatgttgttataatgaacacaagacacattgcattttctggaaacaaatgggaacaaaaagtatactcttcgcatactggctacccaggtggatttagacaagtaacagctgctcagcttcacctgagggatccagtggcaattgtaaaactagctatttatggcatgctgccaaaaaaccttcacagaagaacaatgatggaaaggttgcatctttttccagatgagtatattccagaagatattcttaagaatttagtagaggagcttcctcaaccacgaaaaatacctaaacgtctagatgagtacacaagaagaaatagacgcctttccaagattgtggactccacctgaagaatatcggctataagagaataagaatgcagaaaataacagtgaagtgattgaaactttcttctgatgagtttctttaacgtacaggatggagtaaaacaaatggtacagttcagcacctgttttatgtgttgaatcactgtggggaaaggtcaggaaggtgtagtccttcaataggaaattgtaattaaaatataattttatagaaccatttttatgtaatctgatttgaatgttatagttgataataataaaatcacttacttggttgaaaaaaaaaaaaaaaaaaaaaaaaaaaaaa

SEQ ID NO: 1727 - DNA, 1699 bp, Homo sapiens
gatccctccggggtgggataagggaggggagcccccgcggccccctcccggccctcggcgcggccgcgtgcgtggtgtcattggcccgggcggcccggtgggcgggaggatgacatcagcggcaggttggattataaaggcgcgagcagagtcacgggctcagagcgcacccagccggcgccgcgcagcactgggaccctgctcgccctgcagcccagccagcctgctccgcatccccctgctggtctgcccgccgacctgcgcgccctcgctgccgcccgtgtgcgcccctcgaccccagcggcaccatgcatctctcccagctgctggcctgcgccctgctgctcacgctgctctccctccggccctccgaagccaagcccggggcgccgccgaaggtgggtgctgtcgtggggacgccgagcctgggagaggcgtgggaggctgggggcttggagaatgcggcgcgcaggacccaggagagagggaaggcaggcggctgtctcctccgagatgcgcgtgggcgagagccggggagccctcgaagcgcggattcgggggtccacttctccagcctccggagaacatcggcccatgcgcagccccctaccccagtgtggcctgcccggcgagcagcaaagggagggcagggggcttccggagggagcggcgaaggcggccgcgtggcaggtggatgcggggccaagctggccggcatcggtgggggcggctctgggcttgggagggacaccccgcgccggcgggcgcgtggggctggagcatcagagtcccccgtgctgcagccgcgtgtcccttcacctgcccgctctttcctcggacaggtcccgcgaaccccgccggcagaggagctggccgagccgcaggctgcgggcggcggtcagaagaagggcgacaaggctcccgggggcgggggcgccaatctcaagggcgaccggtcgcgactgctccgggacctgcgcgtggacaccaagtcgcgggcagcgtgggctcgccttctgcaagagcaccccaacgcgcgcaaatacaaaggagccaacaagaagggcttgtccaagggctgcttcggcctcaagctggaccgaatcggctccatgagcggcctgggatgttagtgcggcgccccctggcggcggtgagtacggcccacccgacgcccagccccagcccggcccgggaccgcccgccgcccagccagccttcggaggcgcgcgagccgcctttgctcaagttgtgctaggcgtttgccagccgccccctttattatcccactttacagacaaagaaagcgaaggataacgtgatcggggaactttggcaaggtcagaaacggctcagcctggttgaacccacctggcttcttctggagaagcagaaacaggcttggtggtgtctcacccacccctgaaccgtagctgaactagcagcactggcccctattggccagctggtggggggattgagaggagatcatgggtttgtgggagcagagaaggaaggttacacccacaagtccaggggacatcgatcatctgctggccaccatgccccctgtagtgagagtagccctctgctggcactgtcagagcgcccttctgcctgggacactccgattcctgtcccttctctaaacccaggcagtgggcaaactggtctgtccagggtcctgaggcagctgcag

SEQ ID NO: 1728 - DNA, 1017 bp, Homo sapiens
gggcccacacccagttcccccagggacggccacttcctggtccccgacgcaaccatggctgaagaacaaccgcaggtcgaattgttcgtgaaggctggcagtgatggggccaagattgggaactgcccattctcccagagactgttcatggtactgtggctcaagggagtcaccttcaatgttaccaccgttgacaccaaaaggcggaccgagacagtgcagaagctgtgcccagggggggagctcccattcctgctgtatggcactgaagtgcacacagacaccaacaagattgaggaatttctggaggcagtgctgtgccctcccaggtaccccaagctggcagctctgaaccctgagtccaacacagctgggctggacatatttgccaaattttctgcctacatcaagaattcaaacccagcactcaatgacaatctggagaagggactcctgaaagccctgaaggttttagacaattacttaacatcccccctcccagaagaagtggatgaaaccagtgctgaagatgaaggtgtctctcagaggaagtttttggatggcaacgagctcaccctggctgactgcaacctgttgccaaagttacacatagtacaggtggtgtgtaagaagtaccggggattcaccatccccgaggccttccggggagtgcatcggtacttgagcaatgcctacgcccgggaagaattcgcttccacctgtccagatgatgaggagatcgagctcgcctatgagcaagtggcaaaggccctcaaataagcccctcctgggactccctcaaccccctccattttctccacaaaggccctggtggtttccacattgctacccaatggacacactccaaaatggccagtgggcagggaatcctggagcacttgttccgggatggtgtggtggaagaggggatgagggaaagaaatggggggcctgggtcagatttttattgtggggtggggtgagtaggacaacatatttcagtaataaaatacagaa

SEQ ID NO: 1729 - DNA, 5238 bp, Homo sapiens
gctgtggctgcggctgcggctgcggctgagatttggccgggcgtccgcaggccgtgggggatgggggcagcgagctccagccctcggcggtggcggcggccgtaggtgtggggcgggcgtccgcgtccggcacgcgagatggagcgccgtggatttcagtttttctgactgttacatgaaaggatgattgctcacaaacagaaaaagacaaagaaaaaacgtgcttgggcatcaggtcaactctctactgatattacaacttctgaaatggggctcaagtccttaagttccaactctatttttgatccggattacatcaaggagttggtgaatgatatcaggaagttctcccacatcttactatatttgaaagaagccatattttcagactgttttaaagaagttattcatatacgtctagaggaactgctccgtgttttaaagtctataatgaataaacatcagaacctcaattctgttgatcttcaaaatgctgcagaaatgctcactgcaaaagtgaaagctgtgaacttcacagaagttaatgaagaaaacaaaaacgatctcttccaggaagtgttttcttctattgaaactttggcatttacctttggaaatatccttacaaacttccttatgggagatgtaggcaatgattcattcttgcgactgcctgtttctcgagaaactaagtcgtttgaaaatgtttctgtggaatcagtggactcatccagtgaaaaaggaaatttttcccctttagaactagacaacgtgctgttaaagaacactgactctatcgagctggctttgtcatatgctaaaacttggtcaaaatatactaagaacatagtttcatgggttgaaaaaaagcttaacttggaattggagtccactagaaatatggtcaagttggcagaggcaactagaactaacattggaattcaggagttcatgccactgcagtctctgtttactaatgctcttcttaatgatatagaaagcagtcaccttttacaacaaacaattgcagctctccaggctaacaaatttgtgcagcctctacttggaaggaaaaatgaaatggaaaaacaaaggaaagaaataaaagagctttggaaacaggagcaaaataaaatgcttgaagcagagaatgctctcaaaaaggcaaaattattatgcatgcaacgtcaagatgaatatgagaaagcaaagtcttccatgtttcgtgcagaagaggagcatctgtcttcaagtggcggattagcaaaaaatctcaacaagcaactagaaaaaaagcgaaggttggaagaggaggctctccaaaaagtagaagaagcagatgaactttacaaagtttgtgtgacaaatgttgaagaaagaagaaatgatgtagaaaataccaaaagagaaattttagcacaactccggacacttgttttccagtgtgatcttacccttaaagcggtaacagttaacctcttccacatgcagcatctgcaggctgcttcccttgcagacagattacagtctctctgtggtagtgccaaactctatgacccaggccaagagtacagtgaatttgtcaaggccacaaattcaactgaagaagaaaaagttgatggaaatgtaaataaacatttaaatagttcccaaccttcaggatttggacctgccaactctttagaggatgttgtacgccttcctgacagttctaataaaattgaagaggacagatgctctaacagtgcagatataacaggtccttcctttataagatcatggacatttgggatgtttagtgattctgagagcactggagggagcagcgaatctagatctctggattcagaatctataagtccaggagactttcatcgaaaacttccacgaacaccatccagtggaactatgtcctctgcagatgatctagatgaaagagagccaccttccccttcagaaactggacccaattcccttggaacatttaagaaaacattgatgtcaaaggcagctctcacacacaagtttcgcaaattgagatcccccacgaaatgtagggattgtgaaggcattgtagtgttccaaggtgttgaatgtgaagagtgtctccttgtttgtcatcgaaagtgtttggaaaatttagtcattatttgtggtcatcagaaacttccaggaaaaatacacttatttggagcagaattcacactagttgcaaaaaaggaaccagatggtatcccttttatactcaaaatatgtgcctcagagattgaaaatagagctttgtgtctacagggaatttatcgtgtgtgtggaaacaaaataaaaactgaaaaattgtgtctagctttggaaaatggtatgcacttggtagatatttcagaatttagttcacatgatatctgtgacgtcttgaaattataccttcggcagctcccagaaccatttattttatttcgattgtacaaggaatttatagaccttgcaaaagagatccaacatgtaaatgaagaacaagagacaaaaaagaatagtcttgaagacaaaaaatggccaaatatgtgtatagaaataaaccgaattcttctaaaaagcaaagaccttctaagacaattgccagcatcaaattttaacagtcttcatttccttatagtacatctaaagcgggtagtagatcatgcagaagaaaacaagatgaactccaaaaacttgggggtgatatttggaccaagtctcattaggccaaggccacaaactgctcctatcaccatctcctcccttgcagagtattcaaatcaagcacgcttggtagagtttctcattacttactcacagaagatcttcgatgggtccctacaaccacaagatgttatgtgtagcataggtgttgttgatcaaggctgttttccaaagcctctgttatcaccagaagaaagagacattgaacgttccatgaagtcactatttttttcttcaaaggaagatatccatacttcagagagtgaaagcaaaatttttgaacgagctacatcatttgaggaatcagaacgcaagcaaaatgcgttaggaaaatgtgatgcatgtctcagtgacaaagcacagttgcttctagaccaagaggctgaatcagcatcccaaaagatagaagatggtaaagcccctaagccactttctctgaaatctgataggtcaacaaacaatgtggagaggcatactccaaggaccaagattagacctgtaagtttgcctgtagatagactacttcttgcaagtcctcctaatgagagaaatggcagaaatatgggaaatgtaaatttagacaagttttgcaagaatcctgcctttgaaggagttaatagaaaagacgctgctactactgtttgttccaaatttaatggctttgaccagcaaactctacagaaaattcaggacaaacagtatgaacaaaacagcctaactgccaagactacaatgatcatgcccagtgcactccaggaaaaaggagtgacaacaagcctccagattagtggggaccattctatcaatgccactcaacccagtaagccatatgcagagccagtcaggtcagtgagagaggcatctgagagacggtcttcagattcctaccctctcgctcctgtcagagcacccagaacactgcagcctcaacattggacaacattttataaaccacatgctcccatcatcagtatcagggggaatgaggagaagccagcttcaccctcagcagcatgccctcctggcacagatcacgatccccacggtctcgtggtgaagtcaatgccagacccagacaaagcatcagcttgtcctgggcaagcaactggtcaacctaaagaagactctgaggagcttggcttgcctgatgtgaatccaatgtgtcagagaccaaggctaaaacgaatgcaacagtttgaagacctcgaagatgaaattccacaatttgtgtagggatgtcaaatttcagggtttttttgttgttgttgtgttattttgtggtattgtgcttgttttgtgaaagaatgttttgacagggccccttttgtataggactgccaaatcatgggttttgccttttgttgttgtatttatcctctgttggtaatactgaatggtagaatgttttgatagggtcacatttgtgcctcactggaattatctttaaattctgtatttttaaagttgtgaataagataggtggattcgtattttttaaagttcagttgactttccccaccaaatggtccatttgaatgcatccctaatatatgatatagtctcaactaataggtgcaatttgggaaaatcaggtttattttttggagtggaactgttataagtgcttatttataaaaggaatgtttctgaatgcaagtgcctaaaaagatctttgttggtatgcatatgttttgtcacacaatttatagtgcatctttcaccatttgtgcttttttaagatagtatgtaagctcttatttttcaattggcaattcagttaatttttaaatgtttacataatggccagaaggcttgcaaatctgtatttaattgcattttaattaattgccagtttttacatgtagtagtcagttgtacaaagaaaatgcacttaaacctgtttctaaattatatattcagttatattatatttggctttagatggttttaatacatttgatagtttttcaccccttggctttattttatataaacttttgtttttcagcagttctgaactttttagtattttataaatggtccaaaaaatgcctgtttcagaagtttttgaattcagtgcatttcctcttgatttgtctgggttaaaaccattccttttgtatgaaatgttttgacttaggaatcattttatgtacttgttctacctggattgtcaacaactgaaagtacatatttcatccaaatcaagctaaaatttatttaagttgattctgagagtacaggtcagtaagcctcattatttggaatttgagagaagtataggtgatcggatctgtttcatttataaaaggtccagtttttaggactagtacattcctgttattttctgggttttatcattttgcctaaaataggatataaaagggacaaaaaataagtagactgtttttatgtgtgaattatatttctactaaatgtttttgtatgactgtgttatacttgataatatatatatatatatataaaaaaaaaaaaaaaaaa

SEQ ID NO: 1730 - DNA, 3186 bp, Homo sapiens
ggagtctcgcgaggatcttgtgacttatcgcggcatcgcccagcggttgccgggaaacggcgtggcttccgggggcgggcgccctggtcccggagtcgccgctgggcctgtccgctggcgtcatggcaccgaaaaagaaagggaagaaaggcaaagccaaaggcaccccgattgtcgatgggctcgctccagaggacatgagcaaggagcaggtggaggagcatgtcagccgcatccgggaggagctggaccgcgagcgggaggaacgaaactacttccagctggagcgggacaagatccacaccttctgggagatcacacggaggcagctggaggagaagaaggctgagctgcggaacaaagaccgggagatggaagaagccgaggagaggcaccaggtggagatcaaggtgtacaagcagaaagtgaagcacctgctatatgagcaccagaacaacctgacagagatgaaggctgagggcactgtagtcatgaagctggcacagaaagagcaccgcatacaggagagtgtgctgcgcaaggacatgcgggcactgaaggtggagctcaaggagcaggagctggccagtgaggtggtggtgaagaacctgcggctgaaacacaccgaggagatcaccaggatgcggaatgattttgagaggcaagttcgagaaattgaggccaagtatgataagaagatgaagatgctgagggacgaactcgacttgcggagaaagactgagctccacgaagtggaggagaggaagaatggccagatccacacgctgatgcagcgccacgaggaggccttcaccgacattaagaactactacaacgacatcaccctcaacaacctggccctcatcaactccctcaaggagcagatggaggacatgcggaagaaggaggaccacctggagagggagatggcagaggtgtctgggcagaacaagcgcctggcagaccctctccagaaggctcgggaggagatgagcgagatgcagaaacagctcgcaaactacgagagggacaagcagatcctgctttgcacaaaagcccgtttgaaagtcagggagaaagagctgaaagacctgcagtgggagcatgaagtgttagagcagcgattcaccaaggtgcagcaggagcgggacgagctctatcggaagttcaccgcagccatccaggaggtgcagcagaagacagggttcaagaacctcgtgctagaacgcaagctgcaggctctgagcgccgctgtggagaagaaggaggtgcagttcaacgaggtcctggctgcctctaacctggaccctgcagccctgacgctggtgtcccgcaagctggaggatgttcttgagtcgaagaacagcaccatcaaggacctgcagtatgagctggcccaggtctgtaaggcccataacgacctgctgcgcacgtatgaggcaaagctgctggccttcgggatccctctggacaacgtgggcttcaagcccttggaaacagctgtgatcggacagacgctgggccagggccccgcgggactggtgggcaccccgacgtagctgccccccctggggggccacagcccagagaaccagcctaggaacactcgggatgacaccccttatcacaccaaggacagcaagttttttagattttatcatcagcaaatgaaagcttttcacatgttcttgccatcctctttcctggctctgtggaggagaaccacctgcaggaccctcacccatggtgtccctgtcgctcccttccctgggtgccgcacgtccagcctgtgtccaggcctactccctggtctcacctccgaccacagtcggcggcaccttctcagagtgccccgcactcacctgggggttggggcaatgccgcgctgtgctgcctgtcttcgcgccactgttgtcccaccgaatggacagctttgcaggtgctggcactaacttcattgacacctgagtcacagctgcccagtgggattctccagggggccgggacttccctaggaagtggtgagccaatgctccctgatgagcacaaagcccgctctgttgagggctgggtgggtgcagccagcgtgcgggaacgggcaggcagcctcccgctgccagtcttcgctctaactccctcggtaggtgatgtaggaccaggggcacgtggaacttctgggccttgctggtgatggttaaaacaacctgagatggagaggccaggagagagtataaggggatagcagcaaaccacctatctggccccaacacacctgagagaattcagcagcccagactgagggtctgggatggggtgaaccttccgcaccagagggacactccacagaagccacagcccagtaagtcaggcgcttctgcggcggctccagtgtggggtgaggcagtgaggttaggcccagagagctggagttggctcagatgaaaacctctgtcaacaaagaggggatgaatcacccttggcccagcctccccacaaagcctgaccctgggcaggtgagtgacgggtgtgtcctcgtagagtctattgctgcctggacacctttcttttgggagctcaaagcaagtgagctcacctacctgccaccgcccaggaccagtctgcccactgcctaaatgatgcccggccagcaggacctggcctgcagatcccagtgagtcatgagcctcagccccctccagcccactggggctctcacctccacatgtgggtagaagctttcctgccccctcttcctctagtagccctcagtgtcgaaggtgagcttgtaggtgcctgccttcatctggtccaggacagtgaccatctgggtctgtgtagctggggagagaatgaggctgcagagatggggaccagaagccccccaccccagctttcctgggtctgcatcccagtgggcctcagacactgccctgccacctgtcagacttgggtgagcagacacagtgaggctgttaggtcctgcagttccagagcagtctagggacaccactgccctgtctttaggaaatcacaacacagagaagcaaaaagggaaaaagtctcccacaatttatcccatgagcaagaaccactttatagctggcatatatttttccagattttctctatgcataagtatatttgtttaaaaacttataaagtggattatactatttgtattgtttt

SEQ ID NO: 1731 - DNA, 1316 bp, Homo sapiens
acttctacctgctcactcagaatcatttctgcaccaaccatggccacgtttgtggagctcagtaccaaagccaagatgcccattgtgggcctgggcacttggaagtctcctcttggcaaagtgaaagaagcagtgaaggtggccattgatgcaggatatcggcacattgactgtgcctatgtctatcagaatgaacatgaagtgggggaagccatccaagagaagatccaagagaaggctgtgaagcgggaggacctgttcatcgtcagcaagttgtggcccactttctttgagagaccccttgtgaggaaagcctttgagaagaccctcaaggacctgaagctgagctatctggacgtctatcttattcactggccacagggattcaagtctggggatgaccttttccccaaagatgataaaggtaatgccatcggtggaaaagcaacgttcttggatgcctgggaggccatggaggagctggtggatgaggggctggtgaaagcccttggggtctccaatttcagccacttccagatcgagaagctcttgaacaaacctggactgaaatataaaccagtgactaaccaggttgagtgtcacccatacctcacacaggagaaactgatccagtactgccactccaagggcatcaccgttacggcctacagccccctgggctctccggatagaccttgggccaagccagaagacccttccctgctggaggatcccaagattaaggagattgctgcaaagcacaaaaaaaccgcagcccaggttctgatccgtttccatatccagaggaatgtgattgtcatccccaagtctgtgacaccagcacgcattgttgagaacattcaggtctttgactttaaattgagtgatgaggagatggcaaccatactcagcttcaacagaaactggagggcctgtaacgtgttgcaatcctctcatttggaagactatcccttcaatgcagaatattgaggttgaatctcctggtgagattatacaggagattctctttcttcgctgaagtgtgactacctccactcatgtcccattttagccaagcttatttaagatcacagtgaacttagtcctgttatagacgagaatcgaggtgctgttttagacatttatttctgtatgttcaactaggatcagaatatcacagaaaagcatggcttgaataaggaaatgacaattttttccacttatctgatcagaacaaatgtttattaagcatcagaaactctgccaacactgaggatgtaaagatcaataaaacaaataataatcataaaaaaaaa

SEQ ID NO: 1732 - DNA, 2034 bp, Homo sapiens
ccggccctcgccctgtccgccgccaccgccgccgccgccagagtcgccatgcagatcccgcgcgccgctcttctcccgctgctgctgctgctgctggcggcgcccgcctcggcgcagctgtcccgggccggccgctcggcgcctttggccgccggctgcccagaccgctgcgagccggcgcgctgcccgccgcagccggagcactgcgagggcggccgggcccgggacgcgtgcggctgctgcgaggtgtgcggcgcgcccgagggcgccgcgtgcggcctgcaggagggcccgtgcggcgaggggctgcagtgcgtggtgcccttcggggtgccagcctcggccacggtgcggcggcgcgcgcaggccggcctctgtgtgtgcgccagcagcgagccggtgtgcggcagcgacgccaacacctacgccaacctgtgccagctgcgcgccgccagccgccgctccgagaggctgcaccggccgccggtcatcgtcctgcagcgcggagcctgcggccaagggcaggaagatcccaacagtttgcgccataaatataactttatcgcggacgtggtggagaagatcgcccctgccgtggttcatatcgaattgtttcgcaagcttccgttttctaaacgagaggtgccggtggctagtgggtctgggtttattgtgtcggaagatggactgatcgtgacaaatgcccacgtggtgaccaacaagcaccgggtcaaagttgagctgaagaacggtgccacttacgaagccaaaatcaaggatgtggatgagaaagcagacatcgcactcatcaaaattgaccaccagggcaagctgcctgtcctgctgcttggccgctcctcagagctgcggccgggagagttcgtggtcgccatcggaagcccgttttcccttcaaaacacagtcaccaccgggatcgtgagcaccacccagcgaggcggcaaagagctggggctccgcaactcagacatggactacatccagaccgacgccatcatcaactatggaaactcgggaggcccgttagtaaacctggacggtgaagtgattggaattaacactttgaaagtgacagctggaatctcctttgcaatcccatctgataagattaaaaagttcctcacggagtcccatgaccgacaggccaaaggaaaagccatcaccaagaagaagtatattggtatccgaatgatgtcactcacgtccagcaaagccaaagagctgaaggaccggcaccgggacttcccagacgtgatctcaggagcgtatataattgaagtaattcctgataccccagcagaagctggtggtctcaaggaaaacgacgtcataatcagcatcaatggacagtccgtggtctccgccaatgatgtcagcgacgtcattaaaagggaaagcaccctgaacatggtggtccgcaggggtaatgaagatatcatgatcacagtgattcccgaagaaattgacccataggcagaggcatgagctggacttcatgtttccctcaaagactctcccgtggatgacggatgaggactctgggctgctggaataggacactcaagacttttgactgccattttgtttgttcagtggagactccctggccaacagaatccttcttgatagtttgcaggcaaaacaaatgtaatgttgcagatccgcaggcagaagctctgcccttctgtatcctatgtatgcagtgtgctttttcttgccagcttgggccattcttgcttagacagtcagcatttgtctcctcctttaactgagtcatcatcttagtccaactaatgcagtcgatacaatgcgtagatagaagaagccccacgggagccaggatgggactggtcgtgtttgtgcttttctccaagtcagcacccaaaggtcaatgcacagagaccccgggtgggtgagcgctggcttctcaaacggccgaagttgcctcttttaggaatctctttggaattgggagcacgatgactctgagtttgagctattaaagtacttcttaca

SEQ ID NO: 1733 - DNA, 3176 bp, Homo sapiens
tgaactgagcggcccctgagctgacagatacactgcgcagtggaacggcgagcgagccgacgggcgagtgaggggcgcacatgatcacctcggccgctggaattatttctcttctggatgaagatgaaccacagcttaaggaatttgcactacacaaattgaatgcagttgttaatgacttctgggcagaaatttccgagtccgtagacaaaatagaggttttatacgaagatgaaggtttccggagtcggcagtttgcagccttagtggcatctaaagtattttatcacctgggggcttttgaggagtctctgaattatgctcttggagcaagggacctcttcaatgtcaatgataactctgaatatgtggaaactattatagcaaaatgcattgatcactacaccaaacaatgtgtggaaaatgcagatttgcctgaaggagaaaaaaaaccaattgaccagagattggaaggcatcgtaaataaaatgttccagcgatgtctagatgatcacaagtataaacaggctattggcattgctctggagacacgaagactggacgtctttgaaaagaccatactggagtcgaatgatgtcccaggaatgttagcttatagccttaagctctgcatgtctttaatgcagaataaacagtttcggaataaagtactaagagttctagttaaaatctacatgaacttggagaaacctgatttcatcaatgtttgtcagtgcttaattttcttagatgatcctcaggctgtgagtgatatcttagagaaactggtaaaggaagacaacctcctgatggcatatcagatttgttttgatttgtatgaaagtgctagccagcagtttttgtcatctgtaatccagaatcttcgaactgttggcacccctattgcttctgtgcctggatccactaatacgggtactgttccgggatcagagaaagacagtgactcgatggaaacagaagaaaagacaagcagtgcatttgtaggaaagacaccagaagccagtccagagcctaaggaccagactttgaaaatgattaaaattttaagtggtgaaatggctattgagttacatctgcagttcttaatacgaaacaataatacagacctcatgattctaaaaaacacaaaggatgcagtacggaattctgtatgtcatactgcaaccgttatagcaaactcttttatgcactgtgggacaaccagtgaccagtttcttagagataatttggaatggttagccagagccactaactgggcaaaatttactgctacagccagtttgggtgtaattcataagggtcatgaaaaagaagcattacagttaatggcaacataccttcccaaggatacttctccaggatcagcctatcaggaaggtggaggtctctatgcactaggtcttattcatgccaatcatggtggtgatataattgactatctgcttaatcagcttaagaacgccagcaatgatatcgttagacacggtggcagtctgggccttggtttggcagccatgggaactgcacgtcaagatgtttatgatttgctaaaaacaaacctttatcaggatgatgcagtaacaggggaagcagctggcctggccctaggtttggttatgttgggctctaaaaatgctcaggctattgaggacatggttggttatgcacaagaaactcaacatgagaagattctgcgtggtcttgcagttggcatagctttagtaatgtatgggaggatggaagaggctgatgctctcattgaatctctctgtcgtgacaaggacccaattcttcgaaggtctggaatgtatactgtagccatggcttattgtggctctggtaacaacaaagcaattcgacgcctgctacatgtggctgtaagtgatgtgaatgatgatgtcaggagtgcagcagtagaatcacttgggttcattctattcagaacccctgaacagtgcccaagtgttgtctctttgttgtcagagagttacaaccctcatgtgcgctacggagctgcaatggccttggggatatgctgtgctggtacaggaaacaaggaagccattaatttgctagaaccaatgacaaacgaccccgtgaactacgtgaggcaaggggcactcatagcttcagctctcatcatgatccagcagactgaaatcacttgtccaaaggtgaatcagttcagacagctgtattccaaagtcatcaatgataagcatgatgatgtcatggccaagtttggcgctattctggcccagggcatactggatgcaggtggtcataatgtcacaatctccttgcagtccaggactgggcatactcatatgccttctgtggttggcgtccttgtatttacccagttttggttctggtttcctctttcacacttcctgtcattggcttatacccctacctgtgtcattggccttaacaaggacttaaagatgccgaaagttcagtataaatcgaactgtaaaccatccacatttgcatatcctgcccctctggaagtaccaaaagaaaaagaaaaggaaaaggtttctactgctgtattatctataactgccaaggctaaaaagaaggaaaaagaaaaggaaaaaaaggaggaggagaaaatggaagtggatgaggcagagaaaaaggaggaaaaagagaagaaaaaagaacctgagccaaacttccagttattggataacccagcccgagttatgcctgcccagcttaaggtcctaaccatgccggagacctgtagataccagcctttcaaaccactctctattggaggcatcatcattctgaaggataccagtgaagacattgaggagctggtggaacctgtggcagcacatggcccaaaaatcgaggaggaggaacaagagccagaacccccagaaccatttgagtatattgatgattaaggaccagaggatctcacttgcttatctgaagaagattgtccaggctcatattgggaatgcttatgaggaaattcatgccgagacctgctattcaatgcatgtatcgttgcctctgcactgacctgaagaaccctgtctccaagtctttggttgaagagaagatatatgactgttgagtgtgctctttcacagaacttggttttcaaataaatataagatctccagatggacaag

SEQ ID NO: 1734 - DNA, 1525 bp, Homo sapiens
cgtggtggcttcaataaatttggtggtaagtgaacagagtttccaaaattcccaactcccagcaatgctttgtctgattgttcatttgcagatgtcttagcgtgttaatttaaacgtcaaaggttttgaggtgtccagaaccacctccagaaaggggtagggtagaatgccacctgttgcctggtgtgtgctaacctggagcaggtaggggtaagactcaatagtcatcttttaccaaatgggtttgccccaggttaataagaggggtctagtaggccttggactgggccgttgccacacctggcacttagtgaccatcatcatgagaaactggagagtgcgtgctggaacacgtggtgccatcttggctttaggatccttttgatcgttgtgtccaaggcttgtgtgtgtgtgagtgtgtgggagacaactccgaatgtttacttctggaagagggatgtaacattgccctgaggatggtgaagttggtatacatttataaagtacggaatggtgtcaatgaatgcaattctatgtatatggacttaactgagatgggcaaatagaaactagctctgggaaggaacatgtgcactacttcaagaaagattggccagcatgtgtggctcatgggaaataaccagggtcttaaacagcacaaactgaattcgtggaccaggaaggtcttaaacagcacaaactgaattcatggaaaaatgacaaatttgagaagtctcccagtaagctggaacttttctggtttggttaacaaaaggtttcttgatttgtttcaagatttaaagccaaaggtgtgggttcatgacttaggtgtcattgcgtgtgggtacaatatttatatatggcgaattcagataaacattggtcaaagatggtctctggaaaaacaaaatagaggctgcattacggaaataagatttctggtctgttccctgggacatgcttagaaaatacaatagctattatgtatgggttttattttcatgtggtttcggggaaacaacacggttttaaggatggtttctaaagatgaaattaaaaattgttccacaagggttaagtgtctggtggtaaagttgggagaaactggatggatgcacatcgcatggctggtggcgagcccatctctcttctctcgggtgagagaaccgggccaagctgagttggtttgttcactttaatgggtctccgtttcccctaccacctgtgctgaggacatttcccagcctgagctgggggaggcagcattttctgaagtgtggagttgtctctgtggagactcaagttacagatcttaaggggcctgcctagaattttctcctctgggcaggcgacccaggaaagggtttggagtgaggctgtgagcacttacttgatattttacaagtttggatttggtgttaatttttttccttgtccgttttttcctgttgactaacggctcatcttttccttgtttttgttttttttttgttctttttttccatgtcactaaaggccctcggga

SEQ ID NO: 1735 - DNA, 2274 bp, Homo sapiens
aacaaggtcctgggtaagtagtgggagttctccttcaggatcatgatgttcgtcagagtgaatttcagcaacttccctaccatcgaatttttatcatgcttctcttggaactcaatgcacctgagcatgtgttggaaaccattaatttccagacacttacagctttctgcaatacattccacatcttgaggcctaccaaagctcctggctttgtatatgcctggcttgaactgatttcccatcggatatttattgcaagaatgctggcacatacgccacagcagaaggggtggcctatgtatgcacagctactgattgatttattcaaatatttagcgcctttccttagaaatgtggaactcaccaaacctatgcaaatcctctacaagggcactttaagagtgctgctggttcttttgcatgatttcccagagttcctttgtgattaccattatgggttctgtgatgtgatcccacctaattgtatccagttaagaaatttgatcctgagtgcctttccaagaaacatgaggctccccgacccattcactcctaatctaaaggtggacatgttgagtgaaattaacattgctccccggattctcaccaatttcactggagtaatgccacctcagttcaaaaaggatttggattcctatcttaaaactcgatcaccagtcactttcctgtctgatctgcgcagaaccgtacaggtatccaatgaacctgggaatcgctacaacctccagctcatcaatgcactggtgctctatgtcgggactcaggccattgcgcacatccacaacaagggcagcacaccttcaatgagcaccatcactcactcagcacacatggatatcttccagaatttggctgtggacttggacactgagggtcgctatctctttttgaatgcaattgcaaatcactccggtacccaaatagccacactcactacttcagttgcaccatgctgtacctttttgcagaggccaatacggaagccatccaagaacagatcacaagagttctcttggaacggttgattgtaaataggccacatccttggggtcttcttattaccttcattgagctgattaaaaacccagcgtttaagttctggaaccatgaatttgtacactgtgccccagaaatcgaaaagttattccagtcggtcgcacagtgctgcatgggacagaagcaggcccagcaagtaatggaagggacaggtgccagttagacgaaactgcatctctgttgtacgtgtcagtctagaggtctcactgcaccgagttcataaactgactgaagaatcctttcagctcttcctgactttcccagccctttggtttgtgggtatctgccccaactactgttgggatcagcctcctgtcttatgtgggcacgttccaaagtttaaatgcatttttttgactcttggccaaaatttagaagatgctgtgaatatcattttgaacttgtgtaaatacatgaaagagaaaacctttgtctggaacttcttggctttgtgcaagctgtgtccaaggcaagtacataaactggtaccttgtaatgaagaggcagctgatgccatgcacttgtctgagggcatagctccatgtcttctgacattcctggtgtcccaaagaatagcaaaaagccagtttgaatattatgtaacttatttttttaatgtggacaggggaccttgaaaatcactaagttattaaaaatgtggatgtgctagaattggatatgtccaggaacatgggaagggctcactattggaatcccatgagtttccattttgtctctacccaaacgtattccaaagctgactgcatttgtaccatcttatttcttttggggattatacacctcagccgcctgagatgggggtcagctctttatataaagggaaaccagaccaggcctaaagcccaccccctaccctcacccccacaatcctctcctgaaacttaaaaacagtgggaatataggaaagggaaccaaatctcattaattaattgttctcccccattaccccactgaatgaatggccatacaggctaagctgaataatgacaaagttgaaaggaccaatacagccccttttataaggattttgaatgttttgcaaatgtattggtccctgtgttgtattttgtagccttttcctgggcttcagctcccctacttcttgtatgtgtatgcatactgtagctaaccattaaagtcatgacacacaaaaaaaaaaaaaaaaaaaaaaaaaaa

SEQ ID NO: 1736 - DNA, 2720 bp, Homo sapiens
gctcgatgggcttctcctgcgcgccgcccggtgtctggccgagtccagagagccgcggcgcctcgttccgaggagccatcgccgaagcccgaggccgggtcccgggttggggactgcaggggaaggcagcggcggcggcggcgggagccccaccggggtctgggactggggaactgcctccggcttcacgatgccagtatggacagaatagcttatgatgcttatccccacccaccacttccgaaacattgagcggaaaccagaatacctccagccagagaagtgtgtcccacccccctaccctggtcctgtgggaaccatgtggtttatccgtgacggctgtggcatcgcctgtgccatcgttacctggtttctggtcctctatgcggagttcgtggtcctctttgtcatgctgattccatctcgagactacgtgtatagcatcatcaacggaattgtgttcaacctgctggccttcttggccctggcctcccactgccgggccatgctgacggaccccggggcagtgcccaaaggaaatgccactaaagaattcatcgagagtttacagttgaagcctgggcaggtggtgtacaagtgccccaaatgctgcagcatcaagcccgaccgagcccaccactgcagtgtttgtaagcggtgcattcggaagatggaccaccactgtccctgggtcaacaactgtgtaggcgagaacaaccagaagtacttcgtcctgtttacaatgtacatagctctcatttccttgcacgccctcatcatggtgggattccacttcctgcattgctttgaagaagattggacaacctatggactgaacagggaagaaatggcagagactggaatctctcttcatgaaaaaatgcagccccttaacttcagttcgacagagtgcagctccttctctccacccaccacagtgattctccttatcctgctgtgctttgagggcctgctcttcctcattttcacatcagtgatgtttgggacccaggtgcactccatctgcacagatgagacgggaatagaacaattgaaaaaggaagagagaagatgggctaaaaaaacaaagtggatgaacatgaaagccgtttttggccaccccttctctctaggctgggccagcccctttgccacgccagaccaagggaaggcagacccgtaccagtatgtggtctgaaggaccccgaccggcatggccactcagacacaagtccacaccacagcactaccgtcccatccgttctcatgaatgtttaaatcgaaaaagcaaaacaactactcttaaaactttttttatgtctcaagtaaaatggctgagcattgcagagaaaaaaaaaagtccccacattttattttttaaaaaccatcctttcgatttcttttggtgaccgaagctgctctcttttccttttaaaatcacttctctggcctctggtttctctctgctgtctgtctggcatgactaatgtagagggcgctgtctcgcgctgtgcccattctactaactgagtgagacatgacgctgtgcgtggatggaatagtctggacacctggtgggggatgcatgggaaagccaggagggccctgacctcccactgcccaggaggcagtggcgggctccccgatgggacataaaacctcaccgaagatggatgcttaccccttgaggcctgagaagggcaggatcagaagggaccttggcacagcgacctcatcccccaagtggacacggtttgcctgctaactcgcaaagcaattgcctgccttgtactttatgggcttggggtgtgtagaatgattttgcgggggagtggggagaaagatgaaagaggtcttatttgtattctgaatcagcaattatattccctgtgattatttggaagagtgtgtaggaaagacgtttttccagttcaaaatgccttatacaatcaagaggaaaaaaaattacacaatttcaggcaagctacgttttcctttgtttcatctgcttcctctctcaccaccccatctccctctcttccccagcaagatgtcaattaagcagtgtgaattctgactgcaataggcaccagtgcccaacacatacagccccaccatcatccccttctcattttataaacctcaaagtggattcactttctgatagttaacccccataaatgtgcacgtacctgtgtcttatctatattttaacctgggagactgttgtcctggcatggagatgaccatgatgctggggttacctcacagtccccaccctttcaaagttgacatatggccatcccattggccagaatccacagacacacctaagcctgtggcactgggacagaatagattttccatttgagaggcacttcctgtgtcagtcttgtttgaaggaggtggtgatggtggatagaggtgaaggaggtagggagtgccctccaagtgcaaaaataacaaatatgattattgaccatcggggaattctcacacattgatttgttttttaagcaattgccagaaacccccttttttagcttttgcttggggtgggggtaggagttaaggtttattcaatcctgtcctgggtagggcgaaagttaatctagccatgtgatttttcagaaaagtaagtggaacatgctgccacttttcaattctgtcagtgcttccacatggaaacaaaatgcaataaaatttttccaaaacctgat

SEQ ID NO: 1737 - DNA, 1064 bp, Homo sapiens
aagccgtggatacagaaatctctgcaggcaagttgctccagagcatattgcaggacaagcctgtaacgaatagttaaattcacggcatctggattcctaatccttttccgaaatggcaggtgtgagtgcctgtataaaatattctatgtttaccttcaacttcttgttctggctatgtggtatcttgatcctagcattagcaatatgggtacgagtaagcaatgactctcaagcaatttttggttctgaagatgtaggctctagctcctacgttgctgtggacatattgattgctgtaggtgccatcatcatgattctgggcttcctgggatgctgcggtgctataaaagaaagtcgctgcatgcttctgttgtttttcataggcttgcttctgatcctgctcctgcaggtggcgacaggtatcctaggagctgttttcaaatctaagtctgatcgcattgtgaatgaaactctctatgaaaacacaaagcttttgagcgccacaggggaaagtgaaaaacaattccaggaagccataattgtgtttcaagaagagtttaaatgctgcggtttggtcaatggagctgctgattggggaaataattttcaacactatcctgaattatgtgcctgtctagataagcagagaccatgccaaagctataatggaaaacaagtttacaaagagacctgtatttctttcataaaagacttcttggcaaaaaatttgattatagttattggaatatcatttggactggcagttattgagatactgggtttggtgttttctatggtcctgtattgccagatcgggaacaaatgaatctgtggatgcatcaacctatcgtcagtcaaacccctttaaaatgttgctttggctttgtaaatttaaatatgtaagtgctatataagtcaggagcagctgtctttttaaaatgtctcggctagctagaccacagatatcttctagacatattgaacacatttaagatttgagggatataagggaaaatgatatgaatgtgtatttttactcaaaataaaagtaactgtttacgttg

SEQ ID NO: 1738 - DNA, 798 bp, Homo sapiens
attcggaacagagcaatctgagacaggtgcggcaagtctactgcgggctggtccgggctcctcaggttcagacccgaccgttatccagtcggttcgtggagaggagaggtgcactttacaggtccccgatgaaccaagagaaccctccaccatatccaggccctggtccaacggccccatacccaccttatccaccacaaccaatgggtccaggacctatggggggaccctacccacctcctcaagggtacccctaccaaggatacccacagtacggctggcagggtggacctcaggagcctcctaaaaccacagtgtatgtggtagaagaccaaagaagagatgagctaggaccatccacctgcctyacagcctgctggacggctctctgttgctgctgtctctgggacatgctcacctgaccagaccagcccagccgtcctgtcctgccagctctgctgccacctctgacaggtgtgcctgcccccatctcttctgattgctgttaacaaatgactagctttgcacagacacctctaccttcagcactatgggattctagattaatgggggttgctactgtttaattcagtgacttgatctttttaatgtccaaaatccatttcttattgatctttaaagatgtgctaaatgacttttttggccaaaggcttagttgtgaaaaatataatttttaaattatacattcaaggtagtggccaaatgtaacacatcaatcatggaatgatttctctgctaacagccgcctgtatgtttcaataaatttgtccaaagctc

SEQ ID NO: 1739 - DNA, 2390 bp, Homo sapiens
ggcacgaggggcggacgctggaaagcgccgttcctgactctaatgtacttagacacttgaagccacaaaaggatttatccccgaggttcctcatctgctcgcgaggatgccttttctcttctgccttgcgaaataacagcagcctagctgttgcccgtgaccagtgagaaaggcagcgtcgcgggctgattaggtttcacccaaagggtgccggcgccgaattggtttctaacgagaacttttaaaatgatccgttccaaaaaagggtaggagccgcgagaccctccaactgcccagagaaaacaagtctcgtctggcaaagttctcggcccacgcggtccgcggccaagggccaacggtccctcgccccacgttgccgcagcactgcgcgtgcgcgagccgctgtcaaacgcgctgacggaggccgagaagaaaaaaaggcgggagccgtcaatcccgggttgagcaaaatggcgcgggagaaggagatgcaggagttcacccgtagcttcttccgaggccgcccggacctcagcacgcttacgcattccatcgtgcggcggaggtacttagctcactcgggccgcagccacctggagcccgaggagaagcaggcactgaagcggctggtggaggaggagctgctgaagatgcaggtggatgaagccgcttccagggaagacaaactggaccttaccaagaagggcaagaggcctcccaccccttgtagcgacccggagagaaaaaggttccgcttcaattcagagtcggagtccggctctgaagcctccagcccagactactttggacccccagcaaagaatggggtggcagcagaagtcagcccagccaaagaggagaatccaaggcgagcctcaaaggcagttgaggagagcagtgatgaggaacggcagagggacctgcccgcacagaggggagaggagagcagtgaggaggaggaaaaggggtacaaggggaagactaggaagaaacctgtggtaaagaagcaggcaccaggcaaggcctcagtcagtaggaagcaggccagggaagaaagtgaggagagcgaggcagaacccgttcagaggacagcaaagaaggtggagggaaataaaggaactaaaagcctgaaggaaagtgaacaggagagtgaagaggagatcctagcccagaagaaagagcagagagaggaggaagtggaggaggaagagaaagaagaggatgaggaaaagggggattggaaacccagaaccaggagcaatggccggagaaagtcagctagggaggagaggagctgtaagcagaaaagccaggcaaagaggctcttgggagactcagacagcgaggaagagcagaaagaggcagccagcagtggggatgacagtgggagagatagagaacccccagtgcagaggaagagtgaggacaggacccagcttaagggtgggaagaggttgagtggaagcagcgaggacgaggaagacagtgggaagggggaacccacagctaaaggctctagaaagatggccagactgggcagcaccagtggtgaggaaagtgacttggagagggaggtaagtgacagcgaggcagggggaggcccccagggggagaggaagaaccgctcttccaagaagagctccaggaaaggcaggacacgaagctcctcttcctcctcagatggaagtccagaggccaaaggagggaaggctggctcaggtcgccgtggagaggaccacccggctgtgatgaggctgaagcgctacattcgggcctgtggtgcccatcgaaactacaagaagctgttgggctcctgttgctcacacaaggagcgcctgagtatcctccgggcagaactggaagcgctaggcatgaagggtaccccttccctagggaagtgtcgggccctgaaggagcagagggaggaggcagctgaggtggcctccttggatgttgcgaacatcatcagtggctcgggccggccacgcagacgtacagcctggaaccctttaggagaagcagcacccccaggggagctgtaccgacggaccctggactcagatgaagagcggccccgtcccgcacccccagactggtcacatatgcgtggcatcatcagcagtgatggcgagagtaactgagctctgccacccccaggagggacccttgatacatgtacaaagcatacatagcaccccttgccctgtgtctgtggaacagaagcagcttccttcagagaagactgcagctcccaaggacacaagctgttgggatgctacttctcagcttcacgctgtccctttaaggtgtttattttttaagactcaataaaggagtgtttttaatcacctcaaaaaaaaaaaaaaaaaaaaaaaaaaaaaaaaaaaaaa

SEQ ID NO: 1740 - DNA, 3285 bp, Homo sapiens
ctagaattcagcggccgctgaattctagacccggatgaagagtaacgccattaccgcccgagccgccgagagccttagccgacggaaactggacactggaccggcagcgccatgagactcctcccccgcttgctgctgcttctcttactcgtgttccctgccactgtcttgttccgaggcggccccagaggcttgttagcagtggcacaagatcttacagaggatgaagaaacagtagaagattccataattgaggatgaagatgatgaagccgaggtagaagaagatgaacccacagatttggtagaagataaagaggaagaagatgtgtctggtgaacctgaagcttcaccgagtgcagatacaactatactgtttgtaaaaggagaagattttccagcaaataacattgtgaagttcctggtaggctttaccaacaagggtacagaagattttattgttgaatccttagatgcctcattccgttatcctcaggactaccagttttatatccagaatttcacagctcttcctctgaacactgtagtgccaccccagagacaggcaacttttgagtactctttcattcctgcagagcccatgggcggacgaccatttggtttggtcatcaatctgaactacaaagatttgaacggcaatgtattccaagatgcagtcttcaatcaaacagttacagttattgaaagagaggatgggttagatggagaaacaatctttatgtatatgttccttgctggtcttgggcttctggttattgttggccttcatcaactcctagaatctagaaagcgtaagagacccatacagaaagtagaaatgggtacatcaagtcagaatgatgttgacatgagttggattcctcaggaaacattgaatcaaatcaataaagcttcaccaagaaggttgcccaggaaacgggcacagaagagatcagtgggatctgatgagtaaatgttcctttgtgcaacaattcggtctttacttaacctgccctaatatttttcggcctgatgggaattagtgcagagaagccatgtcaccatagaaggcaactcctacttgtgtgtggactgagcaatcagagtctgtggcgataatattgctgaaaatgcactgcattcatttttctaaagtaacaaatttggtttttttttaaaccattaaaatctatgtgtgtgcgtgtgtatgtatgtgagcagttggtcttaccagaatcattgttgaactacctgaaacaagtctttagaatactaaatataatgctgttgtctcttcctttttgacattttctgattttttcccccaaaactcagttaatatttacccactatgattattgatgtcctgccttgaacagttttaaagaaaacaatttttggaatagctcaaatttcaattgatggcacaaatcagcattttgttgttgttactgtattacaattagtattctaaaggcagaagcagaagtagctgctttttagcaatagaattgtttcagtattttgctgctgtttaatgcgcatcttcagaaaacttcccagtggcttcaaggaatttggggatctctctggcaacaaattgtgaaacatgaaatttctgctgactttaatatatgaaacctaatcctacccccttttttaacaaaaagaaactagtacatttgtgaaaattgtgttgtgttgtccattgttgctctagttctgacccagaggtagctctggagtgattttagacctactcactcagttgtgtgtaggtttttttgttttgttttgagagagaatttttctctccttaatagaagcatcctttttaaagagaagttgccttggtccacacactaagcagaaaaccaagttatcaggacagagatatttcccagttactcctaatcaatgaagaaagtgagttggatatttttaaagcagttaactaattttttcttacctaatcttttgggagttttgcttgttgatataacctttttagttaacctgaaagattccaaaaattgttcttaagtgcttgagactggaaccaaaattaaattgtacttcataaaatcctcttatagagttactcttgccctagattgtaaattaagtttggcattattgtcagactggatggagggtgaagtaaaatagtatgaacaattaagaggctctccccctcttgtctttaagccatattctcctacatgtattttataagaaaatgttaagtcaaattttagtggctctttaattcctgacctcttcattctccttttcagtataacctcccctatgctcatgcccacacagacaaaaaaacaaaacgaaatacacacagaaaaaagtctttccaaactgtttaagtatttaaacatctgagccaaagcagatagaagttattgtataattgttaatcactttgcaaataggggctatcaaattacctatattggcattgctggattataaactctatatctgtaatataaagtgtttgagtttttaattgggctgttatgatcagtaattgattttgagaaagctctatgagctctaagtaactgcatggttttttgtttaatgtaatataggagacccttcacattcccaaggaatatattccaaaacatttttgtgaatatctaagtttgtgaaactactagggcatgatacagtaaggtgtaattacagaatttacgaaatgtaaatggcctctacagagttttatggaatacctggtactaacgtaggcagctgcaaaaccacactgagttacagctgtcagccctcctcattcctaaataacttgccttacatatcagccctcccacttctgaagttcaaattagtgcctcggaaatgtagaatttattatttgtcattttttttttttagcatagattgagaacagttgaactcttaaatcctcagatgccaggggtctgctctagcatcagtaagtatttagcagaaactaactccgtaatgaatggaattcaattccacacatggtttgttcaagcacacttaataagtagcctattttttaaatgtctttttaaaatgtaaatatttggatgaagtttttctttgttttgatatattcatttgctacaccaactatgttttcagaattcatcttttgaacaacttggtttcagaatatgtaaaatgactttaaggatcttgtgtatcaaacctatccccggatgtgtgagaataatgtgttcataaagcatggatctcgtaaaaaaaaaaaaaaaaaaaa

SEQ ID NO: 1741 - DNA, 2290 bp, Homo sapiens
agaacatagggtactccgagtgaagaattcagcagctaagtggaagttgtcttctattccactttaaatacttttatctactgaatcgcaagaaaattgggtttctggtgctgtctgtggttcatgagaaaaaatcccaagaaggaaagccaaaagaacacacagagccaaaaagcctacccaagcaggcatcagatacaggaagtaacgatgctcacaataaaaaagcagtttccagatcagctgaacagcagccatcagagaaatcaacagaaccaaagactaaaccacaagacatgatttctgctggtggagagagtgttgctggtatcactgcaatatctggcaagccgggtgacaagaaaaaagaaaagaaatcattaaccccagctgtgccagttgaatctaaaccggataaaccatcgggaaagtcaggcatggatgctgctttggatgacttaatagatactttaggaggacctgaagaaactgaagaagaaaatacaacgtatactggaccagaagtttcagatccaatgagttccacctacatagaggaattgggtaaaagagaagtcacaattcctccaaaatatagggaactattggctaaacccatagggccagatgatgctatagacgccttgtcatctgacttcacctgtgggtcgcctacagctgctggaaagaaaactgaaaaagaggaatctacagaagttttaaaagctcagtcagcagggacagtcagaagtgctgctccaccccaagagaagaaaagaaaggtggagaaggatacaatgagtgatcaagcactcgaggctctgtcggcttcactgggcacccggcaagcagaacctgagctcgacctccgctcaattaaggaagtcgatgaggcaaaagctaaagaagaaaaactagagaagtgtggtgaggatgatgaaacaatcccatctgagtacagattaaaaccagccacggataaagatggaaaaccactattgccagagcctgaagaaaaacccaagcctcggagtgaatcagaactcattgatgaactttcagaagattttgaccggtctgaatgtaaagagaaaccatctaagccaactgaaaagacagaagaatctaaggccgctgctccagctcctgtgtcggaggctgtgtgtcggacctccatgtgtagtatacagtcagcaccccctgagccggctaccttgaagggcacagtgccagatgatgctgtagaagccttggctgatagcctggggaaaaaggaagcagatccagaagatggaaaacctgtgatggataaagtcaaggagaaggccaaagaagaagaccgtgaaaagcttggtgaaaaagaagaaacaattcctcctgattatagattagaagaggtcaaggataaagatggaaagccactcctgccaaaagagtctaaggaacagcttccacccatgagtgaagacttccttctggatgctttgtctgaggacttctctggtccacaaaatgcttcatctcttaaatttgaagatgctaaacttgctgctgccatctctgaagtggtttcccaaaccccagcttcaacgacccaagctggagccccaccccgtgatacctcgcagagtgacaaagacctcgatgatgccttggataaactctctgacagtctaggacaaaggcagcctgacccagatgagaacaaaccaatggaagataaagtaaaggaaaaagctaaagctgaacatagagacaagcttggagaaagagatgacactatcccacctgaatacagacatctcctggatgataatggacaggacaaaccagtgaagccacctacaaagaaatcagaggattcaaagaaacctgcagatgaccaagaccccattgatgctctctcaggagatctggacagctgtccctccactacagaaacctcacagaacacagcaaaggataagtgcaagaaggctgcttccagctccaaagcacctaagaatggaggtaaagcgaaggattcagcaaagacaacagaggaaacttccaagccaaaagatgactaaagaaatacaagttaaggtatctggtatctgcatgtaaaatcttcagctggtggatggtgacttttgaagaacaaaaggctttggcaacagaaaacaattgttctgggtgatttctagaatggtttttgttgagtctctgaacatcctaaatattggtttgttattcttttccagaaagaaaatgaatttgactggttcacctgccaaaaaaaaaaaaaaaa

SEQ ID NO: 1742 - DNA, 2489 bp, Homo sapiens
gcacgagggggtagagggaaaagagctccgggccaggggctgccgtcgccgccgtcggggagtcagcccgccagcccgccagctcgtcagcccgccaccagcttcgcgggccctgtcggtcccggtaagcgggcctgcgcttaccggaaagaggagcgtaagatgaaagagtatcagaccaaacattgtctggcttgcactgtaaaactagttagctgaagacgacttctcaggtttcttcaggatgcctgcagcacttgtggagaatagccaggttatctgtgaagtgtgggccagtaatctagaagaagagatgaggaagatccgagaaatcgtgcccagttacagttatattgccatggacacagaatttccaggtgttgtggtgcgaccaattggtgaatttcgtagttccatagattaccaatatcagcttctgcggtgcaatgttgaccttttaaaaattatccagctgggccttacattcacaaatgagaagggagagtatccttctggaatcaatacttggcagttcaatttcaaatttaaccttacagaggacatgtactcccaggattccatagatctccttgctaactcaggactacagtttcagaagcatgaagaggaagggattgacacactgcactttgcagagctgcttatgacatcaggagtggttctctgtgacaatgtcaaatggctttcatttcatagtggctatgattttggctatatggtaaagttgcttacagattctcgtttgccagaagaggaacatgaattcttacatattctgaaccttttctccccatccatttatgatgtgaaatacctgatgaagagctgcaaaaatcttaagggaggtcttcaggaagttgctgatcagttggatttgcagaggattggaaggcagcaccaggcaggctcagactcactgctgacaggaatggctttctttaggatgaaagagttgttttttgaggacagcattgatgatgccaagtactgtgggcggctctatggcttaggcacaggagtggcccagaagcagaatgaggatgtggactctgcccaggagaagatgagcatcctggcgattatcaacaacatgcagcagtgatggcgccaggctctgcagggtgggcctgatcccagagtggtgcttactgtgctgactgtgtacttatcttccccaagagaaaatgcttcttttgagcacactgtacctaccatctgcattgagcagaaagacttttgttttactgaagacaaaagatgtttttattttagacccagaagagaggagtttgctctgaatttgtaaataagtcttccccattcctcatactcgagcctctcctctctggttgcctcctgccaccagcatccatggctcatttgacacctttttaaatatcaggacaagtctgaaacaaagtagtaaaatgtatataactcttacctgttgtcattctttttcttttaaatttgttgctaatctctgataatgaagattcttactctgattctcagctgagctgtgagggcttccagggaaaatggaacaaaatggtgttcttaggtaatgggttgtagatactgagtcttcctttccttttctgacccttctcgaggacatttgctttcctcacacttttgtagtctctctttacatattactatatggaaatgaattgctctgtgctgaaatttgaagaccagataatgaaactgaaaagcaaacaatttttactgaatctgtctaccttcattcatgagaactccagaatgagtgttgaccactgaagcatcttttaagtctgtgttccattgtgccattcaggtttgctgtcacatatgcatcatctgaaatcatttgaaatttttgtacaataaaatatcctggatttgatcctgaaggaaactagtaagatcagatttttgggtcatgtctgttgtattttcagtaatgtgatttcagatggtcatctggattctcccacttctctactccattatttctctacttttccttccagcaaaccttgaaacgtgagggagatggattaatgtgagtaacaggaatgtgtctttaaaaagctagagtggttacatttaatcaggcagtaagataatttgggttcttgagttgttttggagtaatatcccacaactggggtaggaagctcaggacttttttctttaaagctagtcatttcaaaagcatattgtatttttttgaatgactacagtatggacaatttcaaaaaccaaaacccactttggattggtggaagtaaaaactggtaactcactcaagtgaatgaatggtcttgcattttaaaagcttatgggaaactcaatttgaaatgattagaaaatgtcaagtattataagctggtatttaagatgcttgtaaatactatttatgtttttaattttgtaaaataaagatttctttttaaaaaaaaaaaaaaaaaaaaaaa

SEQ ID NO: 1743 - DNA, 1391 bp, Homo sapiens
ggacctgtgttacttcccttgtgaagaaacagaattatcatgaaaatttaggtggaaaccatttcgcttttttcttcaaaaataagggaagcatgtgcccaaccacccctgggaaaaagaaccttcaggggcaaaggagcgaacaggtaatttataagaaaaacagaaagtggtcttcttgactgccccagacttccttcggagttgggggaattggggacgcctggacgcgttgtttttgtgtttgtggaaaaaataaatgaaggagcatgaagcccgaggcttctgagatcctttcctgaccaaacccaagtgatttggtgtcggggaattttaatatttttccccttttgtgaggtggaacaaacacaacttgggagcagcgcagcggctcagagcctgccagccaggcgggcgaccagagcaccaatcagagcgcgcctgcgctctatatatacagcggccctgcccaggcgctgcttcatcggcgctttgccacttgtacccgagtttttgattctcaacatgtccgagactgctcctgccgctcccgctgccgcgcctcctgcggagaaggcccctgtaaagaagaaggcggccaaaaaggctgggggtacgcctcgtaaggcgtccggtcccccggtgtcagagctcatcaccaaggctgtggccgcctctaaagagcgtagcggagtttctctggctgctctgaaaaaagcgttggctgccgccggctatgatgtggagaaaaacaacagccgtatcaaacttggtctcaagagcctggtgagcaagggcactctggtgcaaacgaaaggcaccggtgcttctggctcctttaaactcaacaagaaggcagcctccggggaagccaagcccaaggttaaaaaggcgggcggaaccaaacctaagaagccagttggggcagccaagaagcccaagaaggcggctggcggcgcaactccgaagaagagcgctaagaaaacaccgaagaaagcgaagaagccggccgcggccactgtaaccaagaaagtggctaagagcccaaagaaggccaaggttgcgaagcccaagaaagctgccaaaagtgctgctaaggctgtgaagcccaaggccgctaagcccaaggttgtcaagcctaagaaggcggcgcccaagaagaaataggcgaacgcctacttctaaaacccaaaaggctcttttcagagccaccactgatctcaataaaagagctggataatttctttactatctgccttttcttgttctgccctgttacttaaggttagtcgtatgggagttactgaggtatcagacgaattgggtgacggggttggagagtggccgtggtgaggttacagcatttaaacctttattgcggcttctaggtc

SEQ ID NO: 1744 - DNA, 2049 bp, Homo sapiens
gggagctggacgagtccgagcgcgtcacctcctcacgctgcggctgtcgcccgtgtcccgccggcccgttccgtgtcgccccgcagtgctgcggccgccgcggcaccatggctgtgtttgtcgtgctcctggcgttggtggcgggtgttttggggaacgagtttagtatattaaaatcaccagggtctgttgttttccgaaatggaaattggcctataccaggagagcggatcccagacgtggctgcattgtccatgggcttctctgtgaaagaagacctttcttggccaggactcgcagtgggtaacctgtttcatcgtcctcgggctaccgtcatggtgatggtgaagggagtgaacaaactggctctacccccaggcagtgtcatttcgtaccctttggagaatgcagttccttttagtcttgacagtgttgcaaattccattcactccttattttctgaggaaactcctgttgttttgcagttggctcccagtgaggaaagagtgtatatggtagggaaggcaaactcagtgtttgaagacctttcagtcaccttgcgccagctccgtaatcgcctgtttcaagaaaactctgttctcagttcactccccctcaattctctgagtaggaacaatgaagttgacctgctctttctttctgaactgcaagtgctacatgatatttcaagcttgctgtctcgtcataagcatctagccaaggatcattctcctgatttatattcactggagctggcaggtttggatgaaattgggaagcgttatggggaagactctgaacaattcagagatgcttctaagatccttgttgacgctctgcaaaagtttgcagatgacatgtacagtctttatggtgggaatgcagtggtagagttagtcactgtcaagtcatttgacacctccctcattaggaagacaaggactatccttgaggcaaaacgagcgaagaacccagcaagtccctataaccttgcatataagtataattttgaatattccgtggttttcaacatggtactttggataatgatcgccttggccttggctgtgattatcacctcttacaatatttggaacatggatcctggatatgatagcatcatttataggatgacaaaccagaagattcgaatggattgaatgttacctgtgccagaattagaaaagggggttggaaattggctgttttgttaaaatatatcttttagtgtgctttaaagtagatagtatactttacatttataaaaaaaaatcaaattttgttctttattttgtgtgtgcctgtgatgtttttctagagtgaattatagtattgacgtgaatcccactgtggtatagattccataatatgcttgaatattatgatatagccatttaataacattgatttcattctgtttaatggatttggaaatatgcactgaaagaaatgtaaaacatttagaatagctcgtgttatggaaaaaagtgcactgaatttattagacaaacttacgaatgcttaacttctttacacagcataggtgaaaatcatatttgggctattgtatactatgaacaatttgtaaatgtcttaatttgatgtaaataactctgaaacaagagaaaaggtttttaacttagagtagccctaaaatatggatgtgcttatataatcgcttagttttggaactgtatctgagtaacagaggacagctgttttttaaccctcttctgcaagtttgttgacctacatgggctaatatggatactaaaaatactacattgatctaagaagaaactagccttgtggagtatatagatgcttttcattatacacacaaaaatccctgagggacattttgaggcatgaatataaaacatttttatttcagtaacttttccccctgtgtaagttactatggtttgtggtacaacttcattctatagaatattaagtggaagtgggtgaattctactttttatgttggagtggaccaatgtctatcaagagtgacaaataaagttaatgatgattccaaaaaaaaaa

SEQ ID NO: 1745 - DNA, 2104 bp, Homo sapiens
gggcgggcggctccccggcggccccagctgtcaccggcccccccaggatgcaatggcgcagcccccccggctgagccgctctggtgcctcctcactttgggacccagcttctcctgctcccacctctggccccaggcctcggctttgggagggtcaagatgtgctggccagatggactgatgggctgctatacttgggtaccatcaaaaaggtggacagtgctagggaggtgtgtctggtccagtttgaggatgattcgcagtttctggttctatggaaagacattagccctgctgccctccctggagaggaactcctctgttgtgtctgtcgctctgagactgtggtccctgggaaccggctggtcagctgtgagaagtgtcgccatgcttatcaccaggactgccatgttcccagggctccagcccctggagagggagagggcacatcctgggtatgccgccagtgtgtctttgcgatcgccaccaagaggggaggtgccctgaagaagggcccctatgcccgggccatgctgggtatgaagctttctctgccatatggactgaaggggctggactgggatgctggacatctgagcaaccgacagcagagttactgttactgtggtggccctggggagtggaacctgaaaatgctgcagtgccggagctgcctgcagtggttccatgaggcctgcacccagtgtctgagcaagcccctcctctatggggacaggttctatgaatttgaatgctgtgtgtgtcgcgggggccctgagaaagtccggagactacagcttcgctgggtggatgtggcccatcttgtcctgtatcacctcagtgtttgctgtaagaagaaatactttgattttgatcgtgagatcctccccttcacttctgagaattgggacagtttgctcctgggggagctttcagacacccccaaaggagaacgttcttccaagctcctctctgctcttaacagccacaaggaccgtttcatttcagggagagagattaagaagaggaaatgtttgtttggtctccatgctcggatgcctccccctgtggagccccctactggagatggagcactcaccagcttcccttcagggcagggccctgggggaggggtctcacgtcccctggggaagcgccggaggccggagccagagcccctgaggaggaggcagaaggggaaagtggaggagctggggccaccctcagcagtgcgcaatcagcccgagccccaggagcagagggagcgggctcatctgcagagggcactgcaggcctcagtgtctccaccatcccccagccctaaccagagttaccagggcagcagcggctacaacttccggcccacagatgcccgctgcctgcccagcagccccatccggatgtttgcttccttccacccttctgccagcaccgcagggacctctggggacagtggacccccagacaggtcacccctggaacttcacattggtttccccacagacatccctaaaagtgccccccactcgatgactgcctcatcttcctcagtttcatccccatccccaggtcttcctagacgctcagcacccccttctcccctgtgccgtagtttgtctcctgggactgggggaggagtccgaggtggggttggttacctgtcccgaggggaccctgtccgggtccttgctcggagagtacggcctgatggctctgtgcagtacctggttgagtggggaggagggggcatcttctgaacagcctgcctctgcccagctccccattcacacacaccggcactttcataccctgacctctgacctcacctacagctgggatgtacctggagagatagggggtagttctccctactgcccaggctggaatccaagagtggggagtggggaagaggccctcttctctaccctccttcatgattcctgacccctcccatccttcccattttcctttgatgttattttgttacagctttttaaatattttttaaaattatttaacccctgggggcagagactgaggagggaggatgataagggatcccggactctgtatgattgaaataaagagaaataaacaaaaaaaaa

SEQ ID NO: 1746 - DNA, 2173 bp, Homo sapiens
gaactatagttgaaggctgctgccaatacaacaccactgtgaaacagaatggtgtatgccaaatttgagtccctctttaggacgtatgacaaggacatcacctttcagtattttaagagcttcaaacgagtcagaataaacttcagcaaccccttctccgcagcagatgccaggctccagctgcataagactgagtttctgggaaaggaaatgaagttatattttgctcagaccttacacataggaagctcacacctggctccgccaaatccagacaagcagtttctgatctcccctcccgcctctccgccagtgggatggaaacaagtggaagatgcgaccccagtcataaactatgatctcttatatgccatctccaagctggggccaggggaaaagtatgaattgcacgcagcgactgacaccactcccagcgtggtggtccatgtatgtgagagtgatcaagagaaggaggaagaagaggaaatggaaagaatgaggagacctaagccaaaaattatccagaccaggaggccggagtacacgccgatccacctcagctgaactggcacgcgacgaggacgcattccaaatcatactcacgggaggaatcttttactgtggaggtggctggtcacgacttcttcggaggtggcagccgagatcggggtggcagaaatcccagttcatgttgctcagaagagaatcaaggccgtgtccccttgttctaatgctgcacaccagttactgttcatggcacccgggaatgacttgggccaatcactgagtttgtggtgatcgcacaaggacatttgggactgtcttgagaaaacagataatgatagtgttttgtacttgttcttttctggtaggttctgtctgtgccaagggcaggttgatcagtgagctcaggagagagcttcctgtttctaagtggcctgcaggggccactctctactggtaggaagaggtaccacaggaagccgcctagtgcagagaggttgtgaaaacagcagcaatgcaatgtggaaattgtagcgtttcctttcttccctcatgttctcatgtttgtgcatgtatattactgatttacaagactaacctttgttcgtatataaagttacaccgttgttgttttacatcttttgggaagccaggaaagcgtttggaaaacgtatcacctttcccagattctcggattctcgactctttgcaacagcacttgcttgcggaactcttcctggaatgcattcactcagcatccccaaccgtgcaacgtgtaacttgtgcttttgcaaaagaagttgatctgaaattcctctgtagaatttagcttatacaattcagagaatagcagtttcactgccaacttttagtgggtgagaaattttagtttaggtgtttgggatcggacctcagtttctgttgtttcttttatgtggtggtttctatacatgaatcatagccaaaaacttttttggaaactgttggttgagatagttggttcttttaccccacgaagacatcaagatacacttgtaaataaagctgatagcatatattcatacctgttgtacacttgggtgaaaagtatggcagtgggagactaagatgtattaacctacctgtgaatcatatgttgtaggaaaagctgttcccatgtctaacaggacttgaattcaaagcatgtcaagtggatagtagatctgtggcgatatgagagggatgcagtgcctttccccattcattcctgatggaattgttatactaggttaacatttgtaatttttttctagttgtaatgtgtatgtctggtaaataggtattatattttggccttacaataccgtaacaatgtttgtcattttgaaatacttaatgccaagtaacaatgcatgctttggaaatttggaagatggttttattctttgagaagcaaatatgtttgcattaaatgctttgattgttcatatcaagaaattgattgaacgttctcaaaccctgtttacggtacttggtaagagggagccggtttgggagagaccattgcatcgctgtccaagtgtttcttgttaagtgcttttaaactggagaggctaacctcaaaatactttttttaactgcattctataataaatgggcacagtatgctccttacaaaaaaaaaaaaaaa

SEQ ID NO: 1747 - DNA, 3673 bp, Homo sapiens
gggcgctgtgcgcgccgcgatccggtacgtgggcctccgggctgtcccctctgggggcgatcctccctccggagccccccttcaaccctcccggaagtgaggaccagggatgctgtgctgctctcccatgagccagtcaccgagtcggtctgctgcagccctttctgaacctctggccgtctggatgctccactgtgcttgccaagatgaagtgcgtcttggtggccactgagggcgcagaggtcctcttctactggacagatcaggagtttgaagagagtctccggctgaagttcgggcagtcagagaatgaggaagaagagctccctgccctggaggaccagctcagcaccctcctagccccggtcatcatctcctccatgacgatgctggagaagctctcggacacctacacctgcttctccacggaaaatggcaacttcctgtatgtccttcacctgtttggagaatgcctgttcattgccatcaatggtgaccacaccgagagcgagggggacctgcggcggaagctgtatgtgctcaagtacctgtttgaagtgcactttgggctggtgactgtggacggtcatcttatccgaaaggagctgcggcccccagacctggcgcagcgtgtccagctgtgggagcacttccagagcctgctgtggacctacagccgcctgcgggagcaggagcagtgcttcgccgtggaggccctggagcgactgattcacccccagctctgtgagctgtgcatagaggcgctggagcggcacgtcatccaggctgtcaacaccagccccgagcggggaggcgaggaggccctgcatgccttcctgctcgtgcactccaagctgctggcattctactctagccacagtgccagctccctgcgcccggccgacctgcttgccctcatcctcctggttcaggacctctaccccagcgagagcacagcagaggacgacattcagccttccccgcggagggcccggagcagccagaacatccccgtgcagcaggcctggagccctcactccacgggcccaactggggggagctctgcagagacggagacagacagcttctccctccctgaggagtacttcacaccagctccttcccctggcgatcagagctcaggtagcaccatctggctggaggggggcaccccccccatggatgcccttcagatagcagaggacaccctccaaacactggttccccactgccctgtgccttccggccccagaaggatcttcctggatgccaacgtgaaggaaagctactgccccctagtgccccacaccatgtactgcctgcccctgtggcagggcatcaacctggtgctcctgaccaggagccccagcgcgcccctggccctggttctgtcccagctgatggatggcttctccatgctggagaagaagctgaaggaagggccggagcccggggcctccctgcgctcccagcccctcgtgggagacctgcgccagaggatggacaagtttgtcaagaatcgaggggcacaggagattcagagcacctggctggagtttaaggccaaggctttctccaaaagtgagcccggatcctcctgggagctgctccaggcatgtgggaagctgaagcggcagctctgcgccatctaccggctgaactttctgaccacagcccccagcaggggaggcccacacctgccccagcacctgcaggaccaagtgcagaggctcatgcgggagaagctgacggactggaaggacttcttgctggtgaagagcaggaggaacatcaccatggtgtcctacctagaagacttcccaggcttggtgcacttcatctatgtggaccgcaccactgggcagatggtggcgccttccctcaactgcagtcaaaagacctcgtcggagttgggcaaggggccgctggctgcctttgtcaaaactaaggtctggtctctgatccagctggcgcgcagatacctgcagaagggctacaccacgctgctgttccgggagggggatttctactgctcctacttcctgtggttcgagaatgacatggggtacaaactccagatgatcgaggtgcccgtcctctccgacgactcagtgcctatcggcatgctgggaggagactactacaggaagctcctgcgctactacagcaagaaccgcccaaccgaggctgtcaggtgctacgagctgctggccctgcacctgtctgtcatccccactgacctgctggtgcagcaggccggccagctggcccggcgcctctgggaggcctcccgtatccccctgctctaggccaaggtggccgcagtctgcctttgcatcctgtcctccagccacccttgcttgccactgttccccatgacgagagcctcctgtctgcagtggccatcctgaggatagggcagagtgcccagggtggccccagggcttctaaaaccccacctagaccaccctccatgtcaggtactgagcaaggccccagatccttctctctggaggaagagggaagcccaggggtcctgtttgtaaaacaacggtggcaacagctcctcttccagagctgcctctgcctttatcctgggagatggggaggaagccccatctctgctgttccctgcgtggaggaagcccacccagcaagctctctcctaccccaggtaaaaggtgctcctttgcctgggtttgaattccagcgctgccacttcctctctgcacctcctggcaagtttcttctattccccacgtttaaagcgatggcacctccgtcccagggtggtgtgaggattacccagtgtggtaggtgctcaataaatgttggtcattgttatcactgaagcccaacatgctagtgcttctagacccttctgtcagtgctgataagcccttgctaagtcccagccccttcatgcttggctggcgtctgccctagggctggggttctcaagcccctggccctggcccagagatttggattcccttggcggccgtggagcccaggctttgatgtctttcaaagcttctgtggtgcgccctggattgagaaccaccacccgaggggtacagcccctctcttccaaccgagaagttcctgtccagaatggacccagggacaagagaccctgagagccctgggactgggagtgtctgctcctctgagccaggaggccggtgctgggccagagaggacggcgtggcgaaagtcagcgtccactgcagcacaggatcagatggccgtgtgctgtgcatgcaggagcctcgccttctgtgtctttagtcttgagccaaaatttgctcaaaagactgatctcttccttgcagggaacagctttggggctgggggaactagaacccacatgttggtctaaaccctgagaaggtggcagtgaggaagtatcccctcaggtgactggatctgtgttcctccttaacatcatctgatggaatggcaatgaaaagcgtggattgtggaaaatacagaaaaacataaaggaaaaaactccaatcccctgagcccaccactgttcaggacccctgcttttgtcacctactatttccctttagtttttagcagcggctggatgtgatatgtctagtttaaccagtccccttgatctttctatataataaataacacaggagtgaacatcctgaatcag

SEQ ID NO: 1748 - DNA, 2561 bp, Homo sapiens
aggctcaagataaagaccttaaagataactttgtgtgtctctccctttctaggtatttgcataggaatcagaggagttaatcttgtctcttctcacaggtttgaatcttcagacaaacttctgggaggactcggtccctgcctcgcagcagatgttccctgtcactcagtaggcatatggctacccattctccccagaaatctcaccagtgtgctcactgtgagaagacgttcaaccggaaagaccacctgaaaaaccacctccagacccacgaccccaacaaaatggcctttgggtgtgaggagtgtgggaagaagtacaacaccatgctgggctataagaggcacctggccctccatgcggccagcagtggggacctcacctgtggggtctgtgccctggagctagggagcaccgaggtgctactggaccacctcaaagcccatgcggaagagaagccccctagcggaaccaaggaaaagaagcaccagtgcgaccactgtgaaagatgcttctacacccggaaggatgtgcgacgccacctggtggtccacacaggatgcaaggacttcctgtgccagttctgtgcccagagatttgggcgcaaggttcacctcacccggcataccaagaagacccactcacaggagctgatgaaagagagcttgcagaccggagaccttctgagcaccttccacaccatctcgccttcattccaactgaaggctgctgccttgcctcctttccctttaggagcttctgcccagaacgggcttgcaagtagcttgccagctgaggtccatagcctcaccctcagtcccccagaacaagccgcccagcctatgcagccgctgccagagtccctggcctccctccacccctcggtatcccctggctctcctccgccaccccttcccaatcacaagtacaacaccacttctacctcatactccccacttgcaagcctgcccctcaaagcagatactaaaggtttttgcaatatcagtttgtttgaggacttgcctctgcaagagcctcagtcacctcaaaagctcaacccaggttttgatctggctaagggaaatgctggtaaagtaaacctgcccaaggagctgcctgcagatgctgtgaacctaacaatacctgcctctctggacctgtcccccctgttgggcttctggcagctgccccctcctgctacccaaaatacctttgggaatagcactcttgccctggggcctggggaatctttgccccacaggttaagctgtctggggcagcagcagcaagaacccccacttgccatgggcactgtgagcctgggccagctccccctgccccccatccctcatgtgttctcagctggcactggctctgccatcctgcctcatttccatcatgcattcagataattgatttttaaagtgtatttttccgtattctggaagatgttttaagaagcattttaaatgtcagttacaatatgagaaagatttggaaaacgagactgggactatggcttattcagtgatgactggcttgagatgataagagaattctcgaactgcatgtattgtgccaatctgtcctgagtgttcatgctttgtaccaaatttaatgaacgcgtgttctgtaatccaaactgcaaatattgtcataaccaacatccaaaatgacggctgctatatataagtgtttgtccatatgggaatttaatccgtaagcccatggatccataatgttaaactaaataactttatggtggcactgcctagtaagggaactatggaaaggtttggatttctccaaatctgggagaattttcaaaataagaaaataacctttatatgatatactatgactaggctgtgtatttcttttcagggatttttctaccttcagggttggatgtagtttagttactattaccatagccaacctgtagttttacatatacattttcttgtggagcaatagagttctccattttacagaagcattttaaatgtagtttgaatattttccacaagatgctgcaatgtgagttatcacttcatttatcttaaagaaagactaaactggttgtcagttacatctgacagaaaaaaaaaaaaaatcactgtgtaaccaggttaagtggtaaaataatccagggcgtcagtcaaaggcattttgctgactttaatattgattatatttttaacagggaatttaaggaaaatattacctgggaattaaaaaatatatatatattaaaacaagaattttcctttgcctctgtctagcttaaacctactacctcaagctgcttaagttccttaagtattgtttgtaatcaccaataaataagtgcatttgtaattcatcagtcattattagcttttattaaaagaagattacgttttacaatgtaactataatctcttgaatttggtatcttattaatgagttttaaagatgtaaaacctaaccttttttaaagctccattgtcttatgtttttagaggcttttccgtaaacatatatcttacatataataaacttttcaaatcttgcaaatt

SEQ ID NO: 1749 - DNA, 2354 bp, Homo sapiens
agcgccgctgaattctaggcagaaagaaaagagctcccaaatgctatatctatcaggggctctcaagaacaatggaatatcatcctgatttagaaaatttggatgaagatggatatactcaattacacttcgactctcaaagcaataccaggatagctgttgtttcagagaaaggatcgtgtgctgcatctcctccttggcgcctcattgctgtaattttgggaatcctatgcttggtaatactggtgatagctgtggtcctgggtaccatgggggttctttccagcccttgtcctcctaattggattatatatgagaagagctgttatctattcagcatgtcactaaattcctgggatggaagtaaaagacaatgctggcaactgggctctaatctcctaaagatagacagctcaaatgaattgggatttatagtaaaacaagtgtcttcccaacctgataattcattttggataggcctttctcggccccagactgaggtaccatggctctgggaggatggatcaacattctcttctaacttatttcagatcagaaccacagctacccaagaaaacccatctccaaattgtgtatggattcacgtgtcagtcatttatgaccaactgtgtagtgtgccctcatatagtatttgtgagaagaagttttcaatgtaagaggaagggtggagaaggagagagaaatatgtgaggtagtaaggaggacagaaaacagaacagaaaagagtaacagctgaggtcaagataaatgcagaaaatgtttagagagcttggccaactgtaatcttaaccaagaaattgaagggagaggctgtgatttctgtatttgtcgacctacaggtaggctagtattatttttctagttagtagatccctagacatggaatcagggcagccaagcttgagtttttattttttatttatttatttttttgagatagggtctcactttgttacccaggctggagtgcagtggcacaatctcgactcactgcagctatctctcgcctcagcccctcaagtagctgggactacaggtgcatgccaccatgccaggctaatttttggtgttttttgtagagactgggttttgccatgttgaccaagctggtctctaactcctgggcttaagtgatctgcccgccttggcctcccaaagtgctgggattacagatgtgagccaccacacctggccccaagcttgaattttcattctgccattgacttggcatttaccttgggtaagccataagcgaatcttaatttctggctctatcagagttgtttcatgctcaacaatgccattggagtgcacggtgtgttgccacgatttgaccctcaacttctagcagtatatcagttatgaactgagggtgaaatatatttctgaatagctaaatgaagaaatgggaaaaaatcttcaccacagtcagagcaattttattattttcatcagtatgatcataattatgattatcatcttagtaaaaagcaggaactcctactttttctttatcaattaaatagctcagagagtacatctgccatatctctaatagaatcttttttttttttttttttttgagacagagtttcgctcttgttgcccaggctggagtgcaacggcacgatctcggctcaccgcaacctccgccccctgggttcaagcaattctcctgcctcagcctcccaagtagctgggattacagtcaggcaccaccacacccggctaattttgtatttttttagtagagacagggtttctccatgtcggtcagggtagtcccgaactcctgacctcaagtgatctgcctgcctcggcctcccaagtgctgggattacaggcgtgagccactgcacccagcctagaatcttgtataatatgtaattgtagggaaactgctctcataggaaagttttctgctttttaaatacaaaaataccataaaaatacataaaatctgatgatgaatataaaaagtaaccaacctcattggaacaagtattaacattttggaatatgttttattagttttgtgatgtactgttttacaatttttaccatttttttccagtaattacctgtaaaatggtattattggaatgaaactatatttcctcatgtgctgatttgtcttatttttttcatactttcccactggtgctatttttatttccaatggatatttctgtattactagggaggcatttacagtcctctaatgttgattaatatgtgaaaagaaattgtaccaattttactaaattatgcagtttaaaatggatgattttatgttatgtggatttcatttcaataaaaaaaaactcttatta

SEQ ID NO: 1750 - DNA, 1506 bp, Homo sapiens
cagataggcgacacgcggcgggcgctgaggcgggaatggctgctgtactgcagcgcgtcgagcggctgtccaatcgagtcgtgcgtgtgttgggctgtaacccgggtcccatgaccctccaaggcaccaacacctacctagtggggaccggccccaggagaatcctcattgacactggagaaccagcaattccagaatacatcagctgtttaaagcaggctctaactgaatttaacacagcaatccaggaaattgtagtgactcactggcaccgagatcattctggaggcataggagatatttgtaaaagcatcaataatgacactacctattgcattaaaaaactcccacggaatcctcagagagaagaaattataggaaatggagagcaacaatatgtttatctgaaagatggagatgtgattaagactgagggagccactctaagagttctatatacccctggccacactgatgatcacatggctctactcttagaagaggaaaatgctatcttttctggagattgcatcctaggggaaggaacaacggtatttgaagacctctatgattatatgaactctttaaaagagttattgaaaatcaaagctgatattatatatccaggacatggcccagtaattcataatgctgaagctaaaattcaacaatacatttctcacagaaatattcgagagcagcaaattcttacattatttcgtgagaactttgagaaatcatttacagtaatggagcttgtaaaaattatttacaagaatactcctgagaatttacatgaaatggctaaacataatctcttacttcatttgaaaaaactagaaaaagaaggaaaaatatttagcaacacagatcctgacaagaaatggaaagctcatctttagtttcagattaaagaaagctttgttttattttgctttgagagaatggtatgttttcttaactataggttattttatagagaatataaaagtataaaacattaaaaataaccctagatatactttaaaataatgttatatttatgctaaaatatgtaaattacactatacaaccatatgataggttatttctctaaccttgtcttctaacgttttaccaaaaattcataatctaatagtttatcagttttcaatagattaaataaaatgattactttaaaaataataaaatttatctaatttaaagttgatattatttttggccgttagttatctattactagtgatcagttatactgttttctatagctactttatttaacagcacagatttctatgcacctttactctttcctcaacccttgtctctatctgtacataattgctttgtcttgatgtttctatcaactatatcatgactatctattggttccataactctgtatcatgtgtattttcttattctggtataccacaaatgattcatgcaaatgaatttttggtgattgaaaaatattaaattcccaatttaaagtattatatgata

SEQ ID NO: 1751 - DNA, 1552 bp, Homo sapiens
acttaatgggctcaaggtcacctacctgacctaccagcagctcaatggccttcccaaagaagaaacttcagggtcttgtggctgcaaccatcacgccaatgactgagaatggagaaatcaacttttcagtaattggtcagtatgtggattatcttgtgaaagaacagggagtgaagaacatttttgtgaatggcacaacaggagaaggcctgtccctgagcgtctcagagcgtcgccaggttgcagaggagtgggtgacaaaagggaaggacaagctggatcaggtgataattcacgtaggagcactgagcttgaaggagtcacaggaactggcccaacatgcagcagaaataggagctgatggcatcgctgtcattgcaccgttcttcctcaagccatggaccaaagatatcctgattaatttcctaaaggaagtggctgctgccgcccctgccctgccattttattactatcacattcctgccttgacaggggtaaagattcgtgctgaggagttgttggatgggattctggataagatccccaccttccaagggctgaaattcagtgatacagatctcttagacttcgggcaatgtgttgatcagaatcgccagcaacagtttgctttcctttttggggtggatgagcaactgttgagtgctctggtgatgggagcaactggagcagtgggcagtacctataactacctgggaaaaaagacaaaccagatgttggaggcttttgaacaaaaggacttctctttagccctgaactatcagttttgtatccagagatttatcaactttgttgtcaaactaggttttggagtgtcacagaccaaagccatcatgactctggtctctgggattccaatgggcccaccccggcttccactgcagaaagcctccagggagtttactgatagtgctgaagctaaactgaagagcctggatttcctttctttcactgatttaaaggatggaaacttggaagctggtagctagtgcctctctatcaaatcagggtttgcaccttgagacataatctaccttaaatagtgcatttttttctcagggaattttagatgaacttgaataaactctcctagcaaatgaaatctcacaataagcattgaggtaccttttgtgagccttaaaaagtcttattttgtgaaggggcaaaaactctaggagtcacaactctcagtcattcatttcacagatttttttgtggagaaatttctgtttatatggatgaaatggaatcaagaggaaaattgtaattgattaattccatctgtctttaggagctctcattatctcggtctctggttcctaatcctattttaaagttgtctaattttaaaccactataatatgtcttcattttaataaatattcatttggaatctaggaaaactctgagctactgcatttaggcaggcactttaataccaaactgtaacatgtctcaactgtatacaactcaaaatacaccagctcatttggctgctcagtctaactctagaatggatgcttttgaattcatt

SEQ ID NO: 1752 - DNA, 5212 bp, Homo sapiens
cttcactggccctcatcacttctcaccgcgccctccagcttcacccgtacaggtagccccgccgccgcgcacctgccttcgctcccgcaccggtgacagtggatagtggaaacaggagatcgtggatcctccttcaaaaatggaggatggaaagcccgtttgggcgccacaccctacagatggatttcagatgggcaatattgtggatattggccccgacagcttaacaattgaacccttgaatcagaaaggcaagacatttttggctctcataaaccaagtgtttcctgcagaagaggacagtaaaaaagatgtggaagataactgttcactaatgtatttaaatgaagccacactgctccataatatcaaagttcgatatagtaaagacagaatttatacatatgtcgccaacattctgattgcagtgaatccatactttgacatacctaaaatatattcttcagaagcaataaagtcatatcaaggaaaatctcttgggacaagaccacctcatgtctttgcaattgctgataaagcttttcgagacatgaaggtgctcaagatgagtcagtctatcattgtatctggagaatcaggagccggcaaaacagaaaatacaaaatttgttctaagatacctgactgaatcctatggaacaggtcaagatattgatgacagaattgttgaagctaacccactcctagaagcctttggaaatgcgaagactgttcgcaacaataatagcagtcgatttgggaaatttgtagaaatacattttaatgaaaagagctcagttgttggaggatttgtttcacattatctcctagagaaatctaggatctgtgttcaaggcaaagaggaaagaaattatcatatcttttataggttgtgtgctggtgcttctgaagatattagagaaaaacttcatttgagttcaccagataattttcggtatttaaaccgaggctgcactagatactttgctaacaaagaaactgacaaacagattttacagaaccgcaaaagtcctgagtaccttaaggcaggttctatgaaagatcctctgctagatgaccatggtgattttattagaatgtgcacggctatgaaaaaaattggtttggatgatgaagaaaagcttgatctcttccgggtagtagctggcgtcctgcaccttggaaatattgattttgaggaagctggcagcacttcaggtggttgtaatctgaagaataaatctgctcagtctttggaatattgtgctgaattactgggtttggaccaagatgatcttcgagtaagtttgaccacaagagtcatgctaacaacagcagggggcaccaaaggaacagttataaaggtacctctgaaagtggagcaagcaaacaatgctcgtgatgccctggcaaagacagtgtatagccatctttttgatcatgtggtaaacagagtaaatcagtgttttccttttgaaacatcatcctattttattggagtcctagatattgctggttttgagtactttgagcataacagttttgaacaattttgcatcaactattgcaatgaaaaacttcaacaattttttaatgaaaggattctgaaggaggaacaagaactctatcaaaaagaaggtttaggtgttaatgaagtgcattatgtggataatcaggactgtatagatttaattgaagccaaattagtgggaatactggatattttggatgaagaaaatcgccttccccagccaagtgatcaacactttacatctgcagttcaccaaaagcacaaggatcattttcgactcactattcccagaaaatctaagctggcagttcataggaatatcagagacgacgaaggcttcattatcaggcattttgcgggggcagtgtgctatgaaacaacccagtttgtggagaaaaataatgatgctttacatatgtctcttgaatccttaatatgtgaatccagagataagtttatacgggaattatttgaatcatccacaaataacaacaaagatactaaacaaaaagcaggaaaacttagcttcatcagcgtgggaaacaagtttaagacacagttaaatttgcttctggataaacttcgaagtactggagcaagctttattcgttgcatcaaacctaacttaaagatgacaagccaccactttgaaggtgctcaaattctgtctcagcttcagtgttcagggatggtgtctgttttggacttgatgcagggtggttacccatcacgagcttcatttcatgaactctacaacatgtacaaaaagtatatgccagataaacttgcaagattggatccaagactattttgtaaggctttgtttaaagctttgggcttaaatgaaaatgactacaagtttgggttaaccaaagtattttttagacctggcaagtttgcagaatttgatcagatcatgaagtctgaccctgaccacttagcagagttggttaaaagagtcaatcactggctcacatgcagtcgctggaagaaagttcagtggtgctcactctcagtcatcaaattgaaaaacaaaataaaatatcgagctgaagcctgcattaaaatgcaaaaaactattcgaatgtggctttgcaagaggagacacaaacctcgcattgatggtctggttaaggtgggcacactgaaaaaacgacttgataaatttaatgaggtagtcagtgtgttgaaagatggaaaacccgagatgaataaacagatcaagaatctggaaatttctattgatactttgatggccaaaattaagtccactatgatgacgcaggaacaaatccagaaagaatatgatgcactggttaaaagctcagaggaactcctcagtgcattacagaaaaaaaaacagcaggaagaggaagcagaaaggctgaggcgtattcaagaagaaatggaaaaggaaagaaaaagacgtgaagaagacgaaaaacgtcgaagaaaggaagaggaggaaaggcggatgaaacttgagatggaagcaaagagaaaacaagaagaagaagagagaaagaaaagggaagatgatgaaaaacgcattcaagctgaagtggaggcacagctggcccgacagaaggaggaggaatcccaacagcaagcagttctggagcaggagcgcagggaccgggagctggccctgaggattgcccagagtgaagccgagctcatcagtgatgaggcccaggccgacctggcgctgcggagaaatgatggaacaagacccaaaatgacaccggaacaaatggccaaagaaatgtcagaatttttgagtagaggtcctgctgtactagccaccaaagcagctgctggtactaagaaatatgatcttagtaaatggaaatatgcagaactacgtgataccatcaatacttcttgtgatattgagctcctggcagcttgcagagaagaatttcataggagactaaaagtgtatcatgcttggaaatctaagaacaagaagagaaatactgaaacagagcaacgtgctccaaagtctgttactgattatgattttgcaccatttttgaacaattcacctcagcaaaacccagcagctcagattcctgccaggcagcgggagattgaaatgaaccgacagcaacgcttcttccgcatcccattcatccgccctgccgaccagtacaaagaccctcagagtaagaaaaaaggctggtggtatgcccattttgatggaccatggattgcccggcaaatggaactccatcctgacaagccacccatcctacttgtggctggtaaggacgacatggagatgtgtgagctgaatcttgaggagactggcctgactcggaagcgtggtgctgagatcttgccaagacagtttgaagaaatctgggaacgctgtggaggcatccagtaccttcagaatgcgattgagagcagacaggctcggcccacctatgcaacagccatgctgcagagtctgttaaagtagatgttgcacactagccttacagctgggagcctttgccatggtacttaggtagggtgtgtgcccccagatttaaccattccataatcatgttagagttacttctataaagtgaacagattttattaatcacggcttttggtgaatttgtttaaggttaattatggtagcaaattttggacctaaacattatttttctgtatcccgctgtaattcccaaaactctcattattctctaactattacacatgggcatattctgatgtttctcatcctttgccagaagactaccttacatccatcgtaattgttctctaggaaaagagaacttttttcaaaattcaaaatactttttaaggatggcacagtaccatataactggagtaataaaacatgagcttacattcttacaataactaaaccacttaaaatgatcaaggcactaatgttttggtctgaaaagctgtgtactttatagacattttcagacatttttggaaatttccattaaaggtggaaaatctatttttttcctcctttgcagtgtcttagtttgaatgaaacacttcgaagttctagaattctagaaagagccttaatgtatttgatgtattctgtgataagaggtactaatagtatccagcacagatttgcttttctttgctagcacaatgtgtgttgctgtcagaatattctttttatattctgtggaaaaataaaggaaattcagattgtttaaatgcctaaaagttttgagataagttttgtttcaattagaaaaggaaataggttttaggtggcatagtggcttaactggactgaattcaaatattctttcaacttcatctcaatagtgatttttgtatcagaatcttgtccaagttgtttcattgatttagtaagtgttctgcttccaacatctttctttttaagaaattcctagtgtcttttttggcctttgaggttttggtaattgtagacctgtttcataagctttgtaattcagaaatccttgtatttagtaagtgcttgttttacataactgataattttaaaatgttttctttgtgtgctgttagtattgattcaaatgtcagcagctttaagcctaatatttatgactttcacatttggaatttaaagacaaaaatacatcaaggagttatgctgacataattctaaggagttttgttgtattttagaataaaattataaagt

SEQ ID NO: 1753 - DNA, 1551 bp, Homo sapiens
ggcgcccaagccgccgccgccagatcggtgccgattcctgccctgccccgaccgccagcgcgaccatgtcccatcactgggggtacggcaaacacaacggacctgagcactggcataaggacttccccattgccaagggagagcgccagtcccctgttgacatcgacactcatacagccaagtatgacccttccctgaagcccctgtctgtttcctatgatcaagcaacttccctgaggatcctcaacaatggtcatgctttcaacgtggagtttgatgactctcaggacaaagcagtgctcaagggaggacccctggatggcacttacagattgattcagtttcactttcactggggttcacttgatggacaaggttcagagcatactgtggataaaaagaaatatgctgcagaacttcacttggttcactggaacaccaaatatggggattttgggaaagctgtgcagcaacctgatggactggccgttctaggtatttttttgaaggttggcagcgctaaaccgggccttcagaaagttgttgatgtgctggattccattaaaacaaagggcaagagtgctgacttcactaacttcgatcctcgtggcctccttcctgaatccctggattactggacctacccaggctcactgaccacccctcctcttctggaatgtgtgacctggattgtgctcaaggaacccatcagcgtcagcagcgagcaggtgttgaaattccgtaaacttaacttcaatggggagggtgaacccgaagaactgatggtggacaactggcgcccagctcagccactgaagaacaggcaaatcaaagcttccttcaaataagatggtcccatagtctgtatccaaataatgaatcttcgggtgtttccctttagctaagcacagatctaccttggtgatttggaccctggttgctttgtgtctagttttctagacccttcatctcttacttgatagacttactaataaaatgtgaagactagaccaattgtcatgcttgacacaactgctgtggctggttggtgctttgtttatggtagtagtttttctgtaacacagaatataggataagaaataagaataaagtaccttgactttgttcacagcatgtagggtgatgagcactcacaattgttgactaaaatgctgcttttaaaacataggaaagtagaatggttgagtgcaaatccatagcacaagataaattgagctagttaaggcaaatcaggtaaaatagtcatgattctatgtaatgtaaaccagaaaaaataaatgttcatgatttcaagatgttatattaaagaaaaactttaaaaattattatatatttatagcaaagttatcttaaatatgaattctgttgtaatttaatgacttttgaattacagagatataaatgaagtattatctgtaaaaattgttataattagagttgtgatacagagtatatttccattcagacaatatatcataacttaataaatattgtattttagatatattctctaataaaattcagaattct

SEQ ID NO: 1754 - DNA, 2732 bp, Homo sapiens
cagcggccgccgacgctaggaggccgcgctccgcccccgctaccatgaggccccggaaagccttcctgctcctgctgctcttggggctggtgcagctgctggccgtggcgggtgccgagggcccggacgaggattcttctaacagagaaaatgccattgaggatgaagaggaggaggaggaggaagatgatgatgaggaagaagacgacttggaagttaaggaagaaaatggagtcttggtcctaaatgatgcaaactttgataattttgtggctgacaaagacacagtgctgctggagttttatgctccatggtgtggacattgcaagcagtttgctccggaatatgaaaaaattgccaacatattaaaggataaagatcctcccattcctgttgccaagatcgatgcaacctcagcgtctgtgctggccagcaggtttgatgtgagtggctaccccaccatcaagatccttaagaaggggcaggctgtagactacgagggctccagaacccaggaagaaattgttgccaaggtcagagaagtctcccagcccgactggacgcctccaccagaagtcacgcttgtgttgaccaaagagaactttgatgaagttgtgaatgatgcagatatcattctggtggagttttatgccccatggtgtggacactgcaagaaacttgcccccgagtatgagaaggccgccaaggagctcagcaagcgttctcctccaattcccctggcaaaggtcgacgccaccgcagaaacagacctggccaagaggtttgatgtctctggctatcccaccctgaaaattttccgcaaaggaaggccttatgactacaacggcccacgagaaaaatatggaatcgttgattacatgatcgagcagtccgggcctccctccaaggagattctgaccctgaagcaggtccaggagttcctgaaggatggagacgatgtcatcatcatcggggtctttaagggggagagtgacccagcctaccagcaataccaggatgccgctaacaacctgagagaagattacaaatttcaccacactttcagcacagaaatagcaaagttcttgaaagtctcccaggggcagttggttgtaatgcagcctgagaaattccagtccaagtatgagccccggagccacatgatggacgtccagggctccacccaggactcggccatcaaggacttcgtgctgaagtacgccctgcccctggttggccaccgcaaggtgtcaaacgatgctaagcgctacaccaggcgccccctggtggtcgtctactacagtgtggacttcagctttgattacagagctgcaactcagttttggcggagcaaagtcctagaggtggccaaggacttccctgagtacacctttgccattgcggacgaagaggactatgctggggaggtgaaggacctggggctcagcgagagtggggaggatgtcaatgccgccatcctggacgagagtgggaagaagttcgccatggagccagaggagtttgactctgacaccctccgcgagtttgtcactgctttcaaaaaaggaaaactgaagccagtcatcaaatcccagccagtgcccaagaacaacaagggacccgtcaaggtcgtggtgggaaagacctttgactccattgtgatggaccccaagaaggacgtcctcatcgagttctacgcgccatggtgcgggcactgcaagcagctagagcccgtgtacaacagcctggccaagaagtacaagggccaaaagggcctggtcatcgccaagatggacgccactgccaacgacgtccccagcgaccgctataaggtggagggcttccccaccatctacttcgcccccagtggggacaaaaagaacccagttaaatttgagggtggagacagagatctggagcatttgagcaagtttatagaagaacatgccacaaaactgagcaggaccaaggaagagctttgaaggcctgaggtctgcggaaggtgggaggaggcagacaccctgcgtggcccatggtcggggcgtccacgccgaggccggcaacaaacgacagtatctcggattcctttttttttttttttaattttttatactttggtgtttcacttcatgctctgaatactgaataaccatgaatgactgaatagtttagtccagatttttacagaggatacatctatttttatcattatttggggtttgaaaaatttttttttacaccttctaatttctttatttctcaaagcagataattcttctgtgtgaaaatgttttctttttttaatttaaggtttaaaattcctttgccaaatcatgttgattttgctctttgctttttcgttgtctgagaaattgttggcgtagatttggcttctggtatgtgtttctgattgcttcctgttgagcacaaagtgagagctgccactgagcagccctgccaggggtgctgtttcaggctgggcatcgccaggcggcctccctgcaaaccaagggctgggggcaaaggggcatgatccagggtcccccagggtgggctcagctccagggagaggccacccacgtggcagccccacctcttgagagcccccagtgccggagcagaaaggaccctggacccagaggcagatactgcggggtggtagaaaaggtagagtaggctgtggcaatggaataaaacacgattaaaaacgttaaaaaaaaaaaaaaaaaaaa

SEQ ID NO: 1755 - DNA, 1607 bp, Homo sapiens
atgacccaggcaggccggcggggtcctggcacacccgagccgcgtccgcgaacacagcccatggcctccccgcgcctagggaccttctgctgccccacgcgggacgcagccacgcagctcgtgctgagcttccagccgcgggccttccacgcgctctgcctgggcagcggcgggctccgcttggcgctgggccttctgcagctgctgcccggccgccggcccgcgggccccgggtcccccgcgacgtccccgccggcctcggtccgcatcctgcgcgctgccgctgcctgcgaccttctcggctgcctgggtatggtgatccggtccaccgtgtggttaggattcccaaattttgttgacagcgtctcggatatgaaccacacggaaatttggcctgctgctttctgcgtggggagtgcgatgtggatccagctgttgtacagtgcctgcttctggtggctgttttgctatgcagtggatgcttatctggtgatccggagatcggcaggactgagcaccatcctgctgtatcacatcatggcgtggggcctggccaccctgctctgtgtggagggagccgccatgctctactacccttccgtgtccaggtgtgagcggggcctggaccacgccatcccccactatgtcaccatgtacctgcccctgctgctggttctcgtggcgaaccccatcctgttccaaaagacagtgactgcagtggcctctttacttaaaggaagacaaggcatttacacggagaacgagaggaggatgggagccgtgatcaagatccgatttttcaaaatcatgctggttttaattatttgttggttgtcgaatatcatcaatgaaagccttttattctatcttgagatgcaaacagatatcaatggaggttctttgaaacctgtcagaactgcagccaagaccacatggtttattatgggaatcctgaatccagcccagggatttctcttgtctttggccttctacggctggacaggatgcagcctgggttttcagtctcccaggaaggagatccagtgggaatcactgaccacctcggctgctgagggggctcacccatccccactgatgccccatgaaaaccctgcttccgggaaggtgtctcaagtgggtgggcagacttctgacgaagccctgagcatgctgtctgaaggttctgatgccagcacaattgaaattcacactgcaagtgaatcctgcaacaaaaatgagggtgaccctgctctcccaacccatggagacctatgaaggggatgtgctgggggtccagaccccatattcctcagactcaacaattcttgttctttagaactgtgttctcaccttcccaacactgcactgccgaagtgtagcggcccccaaaccttgctctcatcaccagctagagcttcttcccgaagggcctttaggataggagaaagggttcatgcacacacgtgtgagaatggaagagccccctccagaccactctacagctgctctagccttagttgccactaggaagttttctgaggctggctgtaaagtaagtgtaaggtccacatccttggggaagtagttaaataaaatagttatgactg

SEQ ID NO: 1756 - DNA, 3022 bp, Homo sapiens
ctggtgctgaagctcgtcagttcaccatccgccctcggcttccgcggggcgctgggccgccagcctcggcaccgtcctttcctttctccctcgcgttaggcaggtgacagcagggacatgtctcgggagatgcaggatgtagacctcgctgaggtgaagcctttggtggagaaaggggagaccatcaccggcctcctgcaagagtttgatgtccaggagcaggacatcgagactttacatggctctgttcacgtcacgctgtgtgggactcccaagggaaaccggcctgtcatcctcacctaccatgacatcggcatgaaccacaaaacctgctacaaccccctcttcaactacgaggacatgcaggagatcacccagcactttgccgtctgccacgtggacgcccctggccagcaggacggcgcagcctccttccccgcagggtacatgtacccctccatggatcagctggctgaaatgcttcctggagtccttcaacagtttgggctgaaaagcattattggcatgggaacaggagcaggcgcctacatcctaactcgatttgctctaaacaaccctgagatggtggagggccttgtccttatcaacgtgaacccttgtgcggaaggctggatggactgggccgcctccaagatctcaggatggacccaagctctgccggacatggtggtgtcccacctttttgggaaggaagaaatgcagagtaacgtggaagtggtccacacctaccgccagcacattgtgaatgacatgaaccccggcaacctgcacctgttcatcaatgcctacaacagccggcgcgacctggagattgagcgaccaatgccgggaacccacacagtcaccctgcagtgccctgctctgttggtggttggggacagctcgcctgcagtggatgccgtggtggagtgcaactcaaaattggacccaacaaagaccactctcctcaagatggcggactgtggcggcctcccgcagatctcccagccggccaagctcgctgaggccttcaagtacttcgtgcagggcatgggatacatgccctcggctagcatgacccgcctgatgcggtcccgcacagcctctggttccagcgtcacttctctggatggcacccgcagccgctcccacaccagcgagggcacccgaagccgctcccacaccagcgagggcacccgcagccgctcgcacaccagcgagggggcccacctggacatcacccccaactcgggtgctgctgggaacagcgccgggcccaagtccatggaggtctcctgctaggcggcctgcccagctgccgcccccggactctgatctctgtagtggccccctcctccccggccccttttcgccccctgcctgccatactgcgcctaactcggtattaatccaaagcttattttgtaagagtgagctctggtggagacaaatgaggtctattacgtgggtgccctctccaaaggcggggtggcggtggaccaaaggaaggaagcaagcatctccgcatcgcatcctcttccattaaccagtggccggttgccactctcctcccctccctcagagacaccaaactgccaaaaacaagacgcgtagcagcacacacttcacaaagccaagcctaggccgccctgagcatcctggttcaaacgggtgcctggtcagaaggccagccgcccacttcccgtttcctctttaactgaggagaagctgatccagtttccggaaacaaaatccttttctcatttggggaggggggtaatagtgacatgcaggcacctcttttaaacaggcaaaacaggaagggggaaaaggtgggattcatgtcgaggctagaggcatttggaacaacaaatctacgtagttaacttgaagaaaccgatttttaaagttggtgcatctagaaagctttgaatgcagaagcaaacaagcttgatttttctagcatcctcttaatgtgcagcaaaagcaggcaacaaaatctcctggctttacagacaaaaatatttcagcaaacgttgggcatcatggtttttgaaggctttagttctgctttctgcctctcctccacagccccaacctcccacccctgatacatgagccagtgattattcttgttcagggagaagatcatttagatttgttttgcattccttagaatggagggcaacattccacagctgccctggctgtgatgagtgtccttgcaggggccggagtaggagcactggggtgggggcggaattggggttactcgatgtaagggattccttgttgttgtgttgagatccagtgcagttgtgatttctgtggatcccagcttggttccaggaattttgtgtgattggcttaaatccagttttcaatcttcgacagctgggctggaacgtgaactcagtagctgaacctgtctgacccggtcacgttcttggatcctcagaactcttgctcttgtcggggtgggggtgggaactcacgtggggagcggtggctgagaaaatgtaaggattctggaatacatattccatgggactttccttccctctcctgcttcctcttttcctgctccctaacctttcgccgaatggggcagcaccactgacgtttctgggcggccagtgcggctgccaggttcctgtactactgccttgtacttttcattttggctcaccgtggattttctcataggaagtttggtcagagtgaattgaatattgtaagtcagccactgggacccgaggatttctgggaccccgcagttgggaggaggaagtagtccagccttccaggtggcgtgagaggcaatgactcgttacctgccgcccatcaccttggaggccttccctggccttgagtagaaaagtcggggatcggggcaagagaggctgagtacggatgggaaactattgtgcacaagtctttccagaggagtttcttaatgagatatttgtatttatttccagaccaataaatttgtaactttgcaaaaaaaaaaaaaaaaaaa

SEQ ID NO: 1757 - DNA, 7427 bp, Homo sapiens
ctgtttagattcttagattacctctccgacctctgtgtctccatgaacaaatcaattccagtgacccaggaactgatatgtaaagctgtgctgaaccccaccaacgctgacatcctgattgagaccaagttggttctttctcgttttgaatttgaaggtgtctcttccactggagagaatgctctggaggcaggagaagacgaggaagaggtgtggctgttttggagggacagcaacaaagagattcgcagcaagagtgtgagggaattggctcaggatgctaaagaagggcagaaggaggaccgagacgttctcagctactacagatatcagctgaacctctttgcgaggatgtgtctggaccgccaatacctggccatcaacgaaatctcaggccagctggatgtcgatctcattctccgctgcatgtctgacgagaacctgccctatgacctcagggcgtccttctgccgcctcatgcttcacatgcatgtggaccgagatccccaggaacaagtcacccccgtgaaatatgcccgcctctggtcggagattccctcggagatcgccattgacgactatgatagtagtggagcttccaaagatgaaattaaggagagatttgctcagaccatggagtttgtggaggagtatttaagagatgtggtttgtcagaggttccctttctctgataaagagaagaataagcttacgtttgaggttgtaaatttagctaggaatctcatatactttggtttctacaacttctctgaccttctacgattaactaagatccttctggccatattggactgtgtacatgtgacaacaatcttccccattagcaagatggcgaaaggagaagagaataaaggcagtaacgtgatgagatctattcatggcgtgggagagctgatgacccaggtggtgctccggggaggaggctttttgcccatgactcccatggctgctgcccctgaaggcaatgtgaagcaggcagagcctgagaaggaggacatcatggtcatggacaccaagctgaagatcattgagatactccagtttattttgaatgtgaggttggattataggatctcctgcctcctgtgtatatttaagcgagagtttgatgaaagcaattcccagacttcagaaacatcctccggaaacagcagccaagaagggccaagtaatgtaccaggtgctcttgactttgaacacattgaagaacaagcagaaggcatctttggaggaagtgaggagaacaccccactggacttggatgaccacggcggcagaacctttctccgtgtcctgctccacttgacgatgcatgactacccacccctggtgtcaggggccctgcagctcctcttccggcacttcagccagaggcaggaggtgctccaggccttcaaacaggttcaactgctggttaccagccaagatgtggacaactacaaacagatcaaacaagacttggatcaactgaggtccatcgtggaaaagtcagagctttgggtgtacaaagggcagggccccgatgagactatggatggtgcatctggagaaaatgaacataagaaaacggaggagggaaataacaagccacaaaagcatgaaagcaccagcagctacaactacagagtggtcaaagagattttgattcggcttagcaaactctgtgttcaagagagtgcctcagtgagaaagagcaggaagcagcaacagcgtctgctccggaacatgggcgcgcacgccgtggtgctggagctgctgcagattccctatgagaaggccgaagataccaagatgcaagagataatgaggttggctcatgaatttttgcagaatttctgcgcaggcaaccagcagaatcaagctttgctacataaacacataaacctgtttctcaacccagggatcctggaggcagtaaccatgcagcacatcttcatgaacaatttccagctttgcagtgagatcaacgagagagttgttcagcacttcgttcactgcatagagactcacggtcggaatgtccagtatataaagttcttacagacaattgtcaaggcagaagggaaatttattaaaaaatgccaagacatggttatggccgagctggtcaattcgggagaggatgtcctcgtgttctacaacgacagagcctctttccagactctgatccagatgatgcggtcagaacgggatcggatggatgagaacagccctctcatgtaccacatccacttggtcgagctcctggctgtgtgcacggagggtaagaatgtctacacagagatcaagtgcaactccctgctcccgctggatgacatcgttcgcgtggtgacccacgaggactgcatccctgaggttaaaattgcatacattaacttcctgaatcactgctatgtggatacagaggtggaaatgaaggagatttataccagcaatcacatgtggaaattgtttgagaatttccttgtagacatctgcagggcctgtaacaacactagtgacaggaaacatgcagactcgattttggagaagtatgtcaccgaaatcgtcatgagtattgttactactttcttcagctctcccttctcagaccagagtacgactttgcagactcgccagcctgtctttgtgcaactgctgcaaggcgtgttcagggtttaccactgcaactggttaatgccaagccaaaaagcctccgtggagagctgtattcgggtgctgtctgatgtagccaagagccgggccattgccattcccgtggacctggacagccaagtcaacaacctctttctcaagtcccacagcattgtgcagaaaacagccatgaactggcggctctcagcccgcaatgccgcacgcagggactctgttctggcagcttccagagactaccggaatatcattgagagattgcaggacatcgtctccgcgctggaggaccgtctcaggcccctggtgcaggcagagttatctgtgctcgtggatgttctccacagacccgagctgcttttcccagagaacacagacgccagaaggaaatgtgaaagtggcggtttcatttgcaagttaataaagcatacaaaacagctgctagaagaaaatgaagagaagctctgcattaaggtcctacagaccctgagggaaatgatgaccaaagatagaggctatggagaaaagggtgaggcgctcaggcaagttctggtcaaccgttactatggaaacgtcagaccttcgggacgaagagagagccttaccagctttggcaatggcccactgtcagcaggaggacccggcaagcccgggggaggagggggaggttccggatccagctctatgagcaggggtgagatgagtctggccgaggttcagtgtcaccttgacaaggagggggcttccaatctagttatcgacctcatcatgaacgcatccagtgaccgagtgttccatgaaagcattctcctggccattgcccttctggaaggaggcaacaccaccatccagcactcctttttctgtcgcttgacagaagataagaagtcagagaaattctttaaggtgttttatgaccggatgaaggtggcccagcaagaaatcaaagcaacagtgacagtgaacaccagtgacttgggaaataaaaagaaagacgatgaggtagacagggatgccccatcacggaaaaaagctaaagagcccacaacacagataacagaagaggtccgggatcagctcctggaggcctccgctgccaccaggaaagccttcaccactttcaggagggaggctgatcccgacgaccactaccagcctggagagggcacccaggccactgccgacaaggccaaggacgacctggagatgagcgcggtcatcaccatcatgcagcccatcctccgcttccttcagctcctgtgtgaaaaccacaaccgagacctgcagaacttcctccgttgccaaaataacaagaccaactacaatttggtatgtgagaccctgcagtttctggactgtatttgtggaagcacaactggaggccttggtcttctgggcttgtatataaatgaaaagaatgtagcgcttatcaaccaaaccctggaaagtctgaccgaatactgtcaaggaccttgccatgagaaccagaactgcatagccacccatgaatccaatggcattgacatcatcacagccctgatcctcaatgatatcaatcctttgggaaagaagaggatggaccttgtgttagaactgaagaacaatgcctcgaagttgctcctggccatcatggaaagcaggcacgacagtgaaaacgcagagaggatactttataacatgaggcccaaggaactggtggaagtgatcaagaaagcctacatgcaaggtgaagtggaatttgaggatggagaaaacggtgaggatggggcggcgtcccccaggaacgtggggcacaacatctacatattagcccatcagttggctcggcataacaaagaacttcagagcatgctgaaacctggtggccaagtggacggagatgaagccctggagttttatgccaagcacacggcgcagatagagattgtcagattagaccgaacaatggaacagatagtctttcccgtgcccagcatatgtgaattcctaaccaaggagtcaaaactacgaatttactatactacagagagagacgaacaaggcagcaaaatcaatgatttctttctgcggtctgaagacctcttcaatgaaatgaattggcagaagaaactgagagcccagcccgtgttgtactggtgtgcccgcaacatgtctttctggagcagcatttcgtttaacctggccgtcctgatgaacctgctggtggcgtttttctacccgtttaagggagtccgaggaggaaccctggagccccactggtcgggactcctgtggacagccatgctcatctctctggccatcgtcattgccctccccaagccccatggcatccgggccttaattgcctccacaattctacgactgatattttcagtcgggttacaacccacgttgtttcttctgggcgctttcaatgtatgcaataaaatcatctttctaatgagctttgtgggcaactgtgggacattcacaagaggctaccgagccatggttctggatgttgagttcctctatcatttgttgtatctggtgatctgtgccatggggctctttgtccatgaattcttctacagtctgctgctttttgatttagtgtacagagaagagactttgcttaatgtcattaaaagtgtcactcgcaatggacggtccatcatcctgacagcagttctggctctgatcctcgtttacctgttctcaatagtgggctatcttttcttcaaggatgactttatcttggaagtagataggctgcccaatgaaacagctgttccagaaaccggcgagagtttggcaagcgagttcctgttctccgatgtgtgtagggtggagagtggggagaactgctcctctcctgcacccagagaagagctggtccctgcagaagagacggaacaggataaagagcacacatgtgagacgctgctgatgtgcattgtcactgtgctgagtcacgggctgcggagcgggggtggagtaggagatgtactcaggaagccgtccaaagaggaacccctgtttgctgctagagttatttatgacctcttgttcttcttcatggtcatcatcattgttcttaacctgatttttggggttatcattgacacttttgctgacctgaggagtgagaagcagaagaaggaagagatcttgaagaccacgtgctttatctgtggcttggaaagagacaagtttgacaacaagactgtcacctttgaagagcacatcaaggaagaacacaacatgtggcactatctgtgcttcatcgtcctggtgaaagtaaaggactccaccgaatatactgggcctgagagttacgtggcagaaatgatcaaggaaagaaaccttgactggttccccaggatgagagccatgtcattggtcagcagtgattctgaaggagaacagaatgagctgagaaacctgcaggagaagctggagtccaccatgaaacttgtcacgaacctttctggccagctgtcggaattaaaggatcagatgacagaacaaaggaagcagaaacaaagaattggtcttctaggacatcctcctcacatgaatgtcaacccacaacaaccagcataagcaaatgaaagaaaggaattgtatttaccttttataattattattagtgtgggtatggctaatgagttctgattcacccacgaaggttacatttatgctgaatacatttgtaaatactcagttttatactgtatgtatatgattgctactctaaaggtttggatatatgtattgtaattagaattgttggcatgatgacatttcatttgtgccaaaaatattaaaaatgccttttttggaaggactaacagaaagcacctgatttgcacttgaaccagattatagatttaaaagtatatgacatgtattttgtatttaaaactagaatagccagtatttatgttttttataaaactgtgcaatacgaattatgcaatcacaatacatttgtagctcccgagtgtcctaaagggagtgcacttctttgaagctggtgtgttaatactatgtaataaatggttaactttcaaatgatgctgctgccaaaattatattaatagtgagtttcaggcccctgggcattttgtaccatgtaattatcctctggtgatgctgtttctcgttagtggcagtagtgcctccgtctcctagtgataatgctccaagtctatgaactgttaaatcagcattcattttaagaaaagcaactttagtttcaaagatacttttaagcttctaaattgatcatttaaactatttctttaaataagagagccaaattagaggctcatactttagcttgtgaagaagataatgaattttttaaagggaactttctatgcaatgttcaggataaatgcatactgctggccaatcagtgtcatctcctgggtaaattttgatgtcgcattataaagacatgcataattgatggtttctagattatctagtccaaacaatagagtttattttttcttcatctgaaccaacatgctacagtagctaagaagtattaaaactatatacatccatataaagatgaaatatgaactatctcattagaagtcatagttgaccacagacatgttattcttctgaaagagccacattttggttttatttcttgtcacatgatttcttttcttgatggatgaaaaatatgaaaggaaacttttatatctgttgcctagttttgtacatggatctcattttacaagagaatctctctgcaa

SEQ ID NO: 1758 - DNA, 854 bp, Homo sapiens
gaattcccaactctggagtcctctgagagagccaccaaggaggagcaggggagcgacggccggggcagaagttgagaccacccagcagaggagctaggccagtccatctgcatttgtcacccaagaactcttaccatgaagaccctcctactgttggcagtgatcatgatctttggcctactgcaggcccatgggaatttggtgaatttccacagaatgatcaagttgacgacaggaaaggaagccgcactcagttatggcttctacggctgccactgtggcgtgggtggcagaggatcccccaaggatgcaacggatcgctgctgtgtcactcatgactgttgctacaaacgtctggagaaacgtggatgtggcaccaaatttctgagctacaagtttagcaactcggggagcagaatcacctgtgcaaaacaggactcctgcagaagtcaactgtgtgagtgtgataaggctgctgccacctgttttgctagaaacaagacgacctacaataaaaagtaccagtactattccaataaacactgcagagggagcacccctcgttgctgagtcccctcttccctggaaaccttccacccagtgctgaatttccctctctcataccctccctccctaccctaaccaagttccttggccatgcagaaagcatccctcacccatcctagaggccaggcaggagcccttctatacccacccagaatgagacatccagcagatttccagccttctactgctctcctccacctcaactccgtgcttaaccaaagaagctgtactccggggggtctcttctgaataaagcaattagcaaatcaaaaaaaaaaaaggaattc

SEQ ID NO: 1759 - DNA, 1367 bp, Homo sapiens
gggcaaggagctgctggctggacggcggcatgtccgacagcgagaagctcaacctggactcgatcatcgggcgcctgctggaagtgcagggctcgcggcctggcaagaatgtacagctgacagagaacgagatccgcggtctgtgcctgaaatcccgggagatttttctgagccagcccattcttctggagctggaggcacccctcaagatctgcggtgacatacacggccagtactacgaccttctgcgactatttgagtatggcggtttccctcccgagagcaactacctctttctgggggactatgtggacaggggcaagcagtccttggagaccatctgcctgctgctggcctataagatcaagtaccccgagaacttcttcctgctccgtgggaaccacgagtgtgccagcatcaaccgcatctatggtttctacgatgagtgcaagagacgctacaacatcaaactgtggaaaaccttcactgactgcttcaactgcctgcccatcgcggccatagtggacgaaaagatcttctgctgccacggaggcctgtccccggacctgcagtctatggagcagattcggcggatcatgcggcccacagatgtgcctgaccagggcctgctgtgtgacctgctgtggtctgaccctgacaaggacgtgcagggctggggcgagaacgaccgtggcgtctcttttacctttggagccgaggtggtggccaagttcctccacaagcacgacttggacctcatctgccgagcacaccaggtggtagaagacggctatgagttctttgccaagcggcagctggtgacacttttctcagctcccaactactgtggcgagtttgacaatgctggcgccatgatgagtgtggacgagaccctcatgtgctctttccagatcctcaagcccgccgacaagaacaaggggaagtacgggcagttcagtggcctgaaccctggaggccgacccatcaccccaccccgcaattccgccaaagccaagaaatagcccccgcacaccaccctgtgccccagatgatggattgattgtacagaaatcatgctgccatgctgggggggggtcaccccgacccctaaggcccacctgtcacggggaacatggagccttggtgtatttttcttttctttttttaatgaatcaatagcagcgtccagtcccccagggctgcttcctgcctgcacctgcggtactgtgagcaggatcctggggccgaggctgcagctcagggcaacggcaggccaggtcgtgggtctccagccgtgcttggcctcaggctggcagcccggatcctggggcaacccatctggtctcttgaataaaggtcaaagctgg

SEQ ID NO: 1760 - DNA, 2349 bp, Homo sapiens
aaagaaaagagctcccaaatgctatatctattcaggggctctcaagaacaatggaatatcatcctgatttagaaaatttggatgaagatggatatactcaattacacttcgactctcaaagcaataccaggatagctgttgtttcagagaaaggatcgtgtgctgcatctcctccttggcgcctcattgctgtaattttgggaatcctatgcttggtaatactggtgatagctgtggtcctgggtaccatgggggttctttccagcccttgtcctcctaattggattatatatgagaagagctgttatctattcagcatgtcactaaattcctgggatggaagtaaaagacaatgctggcaactgggctctaatctcctaaagatagacagctcaaatgaattgggatttatagtaaaacaagtgtcttcccaacctgataattcattttggataggcctttctcggccccagactgaggtaccatggctctgggaggatggatcaacattctcttctaacttatttcagatcagaaccacagctacccaagaaaacccatctccaaattgtgtatggattcacgtgtcagtcatttatgaccaactgtgtagtgtgccctcatatagtatttgtgagaagaagttttcaatgtaaggggaagggtggagaaggagagagaaatatgtgaggtagtaaggaggacagaaaacagaacagaaaagagtaacagctgaggtcaagataaatgcagaaaatgtttagagagcttggccaactgtaatcttaaccaagaaattgaagggagaggctgtgatttctgtatttgtcgacctacaggtaggctagtattatttttctagttagtagatccctagacatggaatcagggcagccaagcttgagtttttattttttatttatttatttttttgagatagggtctcactttgttacccaggctggagtgcagtggcacaatctcgactcactgcagctatctctcgcctcagcccctcaagtagctgggactacaggtgcatgccaccatgccaggctaatttttggtgttttttgtagagactgggttttgccatgttgaccaagctggtctctaactcctgggcttaagtgatctgcccgccttggcctcccaaagtgctgggattacagatgtgagccaccacacctggccccaagcttgaattttcattctgccattgacttggcatttaccttgggtaagccataagcgaatcttaatttctggctctatcagagttgtttcatgctcaacaatgccattgaagtgcacggtgtgttgccacgatttgaccctcaacttctagcagtatatcagttatgaactgagggtgaaatatatttctgaatagctaaatgaagaaatgggaaaaaatcttcaccacagtcagagcaattttattattttcatcagtatgatcataattatgattatcatcttagtaaaaagcaggaactcctactttttctttatcaattaaatagctcagagagtacatctgccatatctctaatagaatcttttttttttttttttttttgagacagagtttcgctcttgttgcccaggctggagtgcaacggcacgatctcggctcamcgcaacctccgccccctgggttcaagcaattctcctgcctcagcctcccaagtagctgggattacagtcaggcaccaccacacccggctaattttgtatttttttagtagagacagggtttctccatgtcggtcagggtagtcccgaactcctgtcctcaagtgatctgcctgcctcggcctcccaagtgctgggattacaggcgtgagccactgcacccagcctagaatcttgtataatatgtaattgtagggaaactgctctcataggaaagttttctgctttttaaatacaaaaatacataaaaatacataaaatctgatgatgaatataaaaaagtaaccaacctcattggaacaagtattaacattttggaatatgttttattagttttgtgatgtactgttttacaatttttaccatttttttcagtaattactgtaaaatggtattattggaatgaaactatatttcctcatgtgctgatttgtcttatttttttcatactttcccactggtgctatttttatttccaatggatatttctgtattactagggaggcatttacagtcctctaatgttgattaatatgtgaaaagaaattgtaccaattttactaaattatgcagtttaaaatggatgattttatgttatgtggatttcatttcaataaaaaaaaactcttatcaaaaaaaaaaaaaaaaaaa

SEQ ID NO: 1761 - DNA, 814 bp, Homo sapiens
ataacacctagtttgagtcaacctggttaagtacaaatatgagaaggcttctcattcaggtccatgcttgcctactcctctgtccactgctttcgtgaagacaagatgaagttcacaattgtctttgctggacttcttggagtctttctagctcctgcccttgctaactataatatcaacgtcaatgatgacaacaacaatgctggaagtgggcagcagtcagtgagtgtcaacaatgaacacaatgtggccaatgttgacaataacaacggatgggactcctggaattccatctgggattatggaaatggctttgctgcaaccagactctttcaaaagaagacatgcattgtgcacaaaatgaacaaggaagtcatgccctccattcaatcccttgatgcactggtcaaggaaaagaagcttcagggtaagggaccaggaggaccacctcccaagggcctgatgtactcagtcaacccaaacaaagtcgatgacctgagcaagttcggaaaaaacattgcaaacatgtgtcgtgggattccaacatacatggctgaggagatgcaagaggcaagcctgtttttttactcaggaacgtgctacacgaccagtgtactatggattgtggacatttccttctgtggagacacggtggagaactaaacaattttttaaagccactatggatttagtcgtctgaatatgctgtgcagaaaaaatatgggctccagtggtttttaccatgtcattctgaaatttttctctactagttatgtttgatttctttaagtttcaataaaatcatttagcattg

SEQ ID NO: 1762 - DNA, 1543 bp, Homo sapiens
atggtgagcaccatgcttccagctaacagggatggccacggggactgttattcgcaagctggttttccctgtgagggtgacgttagcattacccccaacctcagtttattcatctgtttatgacacagtacacaggaggcaaagtgtttcctcgtgccgaattcggcacgaggctctcagctctcggcgcacggcccagcttccttcaaaatgtctactgttcacgaaatcctgtgcaagctcagcttggagggtgatcactctacacccccaagtgcatatgggtctgtcaaagcctatactaactttgatgctgagcgggatgctttgaacattgaaacagccatcaagaccaaaggtgtggatgaggtcaccattgtcaacattttgaccaaccgcagcaatgcacagagacaggatattgccttcgcctaccagagaaggaccaaaaaggaacttgcatcagcactgaagtcagccttatctggccacctggagacggtgattttgggcctattgaagacacctgctcagtatgacgcttctgagctaaaagcttccatgaaggggctgggaaccgacgaggactctctcattgagatcatctgctccagaaccaaccaggagctgcaggaaattaacagagtctacaaggaaatgtacaagactgatctggagaaggacattatttcggacacatctggtgacttccgcaagctgatggttgccctggcaaagggtagaagagcagaggatggctctgtcattgattatgaactgattgaccaagatgctcgggatctctatgacgctggagtgaagaggaaaggaactgatgttcccaagtggatcagcatcatgaccgagcggagcgtgccccacctccagaaagtatttgataggtacaagagttacagcccttatgacatgttggaaagcatcaggaaagaggttaaaggagacctggaaaatgctttcctgaacctggttcagtgcattcagaacaagcccctgtattttgctgatcggctgtatgactccatgaagggcaaggggacgcgagataaggtcctgatcagaatcatggtctcccgcagtgaagtggacatgttgaaaattaggtctgaattcaagagaaagtacggcaagtccctgtactattatatccagcaagacactaagggcgactaccagaaagcgctgctgtacctgtgtggtggagatgactgaagcccgacacggcctgagcgtccagaaatggtgctcaccatgcttccagctaacaggtctagaaaaccagcttgcgaataacagtccccgtggccatccctgtgagggtgacgttagcattacccccaacctcattttagttgcctaagcattgcctggccttcctgtctagtctctcctgtaagccaaagaaatgaacattccaaggagttggaagtgaagtctatgatgtgaaacactttgcctcctgtgtactgtgtcataaacagatgaataaactgaatttgtactttaaaaaaaaaaaaaaaaaaaa

SEQ ID NO: 1763 - DNA, 1887 bp, Homo sapiens
ggggtatcgataagtttctttttttttttttttttgagacagaatctcgctctgtcgcccaggctggaatgcagtggcgcgatctctgctcactacaagctccgcctcccgggttcacgccattctcccgcctcggcctcccaaagtgctgggattacaggcgtgagccaccgcgcccggccttaaaaattgaatctgtagcttaggccatccaaattttataaatccaaattaactttagaatgtttctattactttcacttttacatatataaattttaagtgtcctgattggctgaacaatatctcacatcaaatgctttgcctggaaatagatatcccactggggatagtggtgtgtaaactatgacttggacaattctatatactcaagcaccataaaaagtatgcagttgaaaagaaaatcaaagttgactcctgggtgccaactaaatattcaaatcaggtactcatccttatcagctaaattcattttcaccaggaacagaccaccaaataaattattttatcctaataactagttttgaagcagtgtaattactctggaagaaggctctaaaaagtcatgattcccccactattttgaaatgtatcctctaacaaggatcattatagtgtaatcttaatttttatgtttatcaagatgaaatcttgtttgaattgtgatattataaaaggggactcaaaaatccaagcagtctactgtgtttaaattaacaccacaaccttccttatcagattataagagtagaaaaattaacacttggtgtgtgaatcttcaggaaaatgagctatttcataagctcaaacaagcagcttccttttccagagaatatagaattatattatggtctccttaaatgtttagtagctcttatggtcacagcatttttaatctccctatggcatctttatggaataattttctaaagggtaattctctactaaaaatatcagaccccgaccatatttaatgtggagagcaataccctcttagaaagaaaatacattgactcatacacttgttaaaagttaataaagaaatagctcatttttaaagccggaagtttatggtctctgcatcgtcaatttaatttaagcattgctgagacaatctttaatctactcccctttttgtaataccttatttatggtgcattttcatttttatttgggggaaacgttagcccaacagagccggcagatgaaagtgttgaaaagaggtcaaatggaaacaaaggctcttacccgctgtatttcagacaggactgaggcacttagccgaggagccactgggttattagattaatttcaaaagagcttttacaagttgcttaattcctttttttttttttttttcaaaaacccatgaaccacaaactcaaatttctcctcaaatggggttaatctgacaaatgaggcatggacccagccttgtggaaaaagcattccacgctaatgagatcttggtctttcttgtgaggctacgttatttatgtaaatatgtctggaggcaccttctctaagcttttagttttctatgatctattagtttagtgtttattaaagaatcaaatgtatagaattaccaggcattcgtggggaatgctgtgtagcaaatgtaaaactgacctgctcggaagaaacgtaggaacgcttcaaacccactgtaatgtttggtttgagattattttcattgctttgagagtgaactgcctaagagtaggccttataataaatgctatgtgcgtcttcagtagttccaagctaaagcaatttggcattctcccactgtgatttgtgacttttaaacccacaaaataaaagctttttggtattgataaaaagaaaaaaaaaaaaaaaaaa

SEQ ID NO: 1764 - DNA, 2570 bp, Homo sapiens
aactacgaagatggcggttgcgcgcttggcagctgtggcggcctgggtaccttgtcggagctggggctgggcagccgtccccttcggtccccaccgtggcctcagcgtgctgcttgcacggatacctcagcgggcgccacggtggctcccagcttgtagacaaaagacgtcactctcattccttaatcgaccagaccttccaaacctggcttataagaagctaaaaggcaaaagtccaggaattatcttcatccctggctatctttcttatatgaatggtacaaaagcgttggcgattgaggagttttgcaaatctctaggtcacgcctgcataaggtttgattactcaggagttggaagttcagatggtaactcagaggaaagcacactggggaaatggagaaaagatgttctttctataattgatgacttagctgatgggccacagattcttgttggatctagccttggagggtggcttatgcttcatgctgcaattgcacgaccagagaaggtcgtggctcttattggtgtagctacagcctgcagataccttagtgacaaagtttaatcagcttcctgttgagctaaaaaaggaagtagagatgaaaggtgtgtggagcatgccatcaaaatactctgaagaaggagtttataacgttcagtacagtttcattaaagaagctgaacatcactgcttgttacatagcccaattcctgtgaactgccccataagattgctccatggcatgaaggatgacattgtaccttggcatacatcaatgcaggttgccgatcgagtactcagcacagatgtggatgtcatcctccgaaaacacagtgatcaccgaatgagggaaaaagcagacattcaacttcttgtttacactattgatgacttaattgataagctctcaactatagttaactagtatcacatgtttagttggtatgtaaactaatgtatccagaagattggaagagggataagaaatgaaagatcctgatactttaggtttttccctttcctctattttgtaaatataagatgagtattatttaatgatgtatttgcataagtaatgcaaattgtgaagaaggaccagctgctgtttagaaaattttctccttccttctgtccttgattttttttcattaaagtatttcctttttttaattcaagaaaagtttacctttcttatgcttatgttagctatgccagctcttaattgcatccttttctaattaggattattaataaagcgtgaatattttgttttttattatagacagaaatttgtaacattacttctgatttgaaaatgcaattcacaaaatatagggaaatttttattgaagtaaatttgaaatgatggagaaatttcagaagcataataaagttcacaataaggataatactttatataatgtataaagtatatataatataatatatatgttatataaactgcacattatattcaaacttaaaattgagctttttttttaaaggcccaaaattgtacagtgatacaaggagctatttctaaaatttggcttatgtataatatatttaaatggggaatttcatctaaaacaatgatgtagtatttttaatattctgattggtaaaattaaagaggaaattaatctttatatattatttcttgcagaaacattcattattttattaatattgccctaagtacaactaggcaagtgattgccacctaaatcagaagacgttctaaagtcagtaagaaagtgtgaaatgctagtataaaggttattttttttctttcctaaataactaaagtgaggtgtagattgagccttgatattatttagttaatgttttttattaattaattttggctggactttatttagcttgattaggttattatctgtcaaaccttttaagttgacaacatgactcatatatatacatgtgtataagatgagcatgtgtcgaagacttattcgactcattaatgaggaaaccagcagatagtaaacctggttcacagtacaattcatgaaactgagtatttatgggccttgaagaaaaaatgttgagataaaattgctgtgccgaaaaaagtgttaatgaagccgacttgactacttaactttagagacttgctttacaaggttggcccttgattggcatctgggaacttggagttcagggggcttccaccattcccagaactgatcaaagtagcttactatatctaaactgtaaaacaatatagtttctcctgaacacctgctttccttctgggagtctggaattttggtatgtgccagccagagactacctttgtgaccagctcccagtaaaaaccccaggcactcagtctctaacaagcttttctggttgacagtgtttcacaagtgctgttacaactggttgctgggagaattaagctcatcctctgtgattccactggcggaggattcttggaagcttgcacttagtttcccctgacttcaccccatgtgtcttttttcctttgctgattttgttttgtatcctttcactgtaataaatcatggccgtgagc

SEQ ID NO: 1765 - DNA, 2538 bp, Homo sapiens
ccctgcctcttccagagagactcccccattgctgtctcttgtgtgtgtcatgcacaaggaaggcttggttgtgtgccaggataaggggcacaagggcctcgggtgtggccagagaccccatgcttaagcttttatggtataggtcaggctgcaggggtttgagggcctcagttgtatatcagaatcttcagagcactgcgatgttcaggggtgagtcaggtctgtagatgtgcacggggtcttctgaagggtcagtttctgtaatcactttcaggtgtgtcagggccttgtgcagtaacagtgcacacagaagttagtgtttctgtgggctaagggttgtagctctgtatcaggattctgggagtgggtctggatttctggtgtgtggacttaagaagctgtgtcagacttgggggaggggcgttcatgtataactgggttcacataggccaagactcccaggtgcattttaggcagagcctcaggtgtgttagaggtcccaggggcagagaggctataggtgctgtcagaggccttggggacatttagggcagagcctcgagtgacaggtcctgggacagtgggagccaagggcaagtgctagagttgcagtgaatttagagcaaagcctcagctaagtgacacatcccagggcagtaggggatctatctaggttcgtgctgggcctcaggtaagtgacaggccttaggacaatgggggctgtggcatgcgtcaggttacctgccttgatatgggatcgtgacaggcccctccctatgtgcaggagacaagcagcccaagaaacaggagaaaaacccagtgttggtgtccccagagtttgtggatgaagctctgtgtgcgtgcgaggagtaccttagcaacttggcccacatggacatcgacaaggacctggaggccccgctgtacctcacccccgagggctggtccctcttcctccagcgctactaccaagtggtccacgaaggggcagaactcaggcacctcgacactcaggtccagcgctgtgaggacatcctgcagcagctgcaggccgtggtaccccagatagacatggaaggggatcgcaacatctggatcgtgaagccaggagccaagtcccgcggacgaggcatcatgtgcatggaccacctggaggagatgctgaagctggtgaacggcaaccccgtggtgatgaaggacggcaagtgggtggtgcagaagtatattgagcggcccctcctcatctttggcaccaagtttgacctcagacagtggttcctggtaactgactggaacccacttaccgtgtggttctaccgcgacagctatatccgcttttccacgcagcccttctccctgaagaacctggacaactcagtgcacctgtgcaacaactccatccagaagcacctggagaactcatgccatcggcatccactgcttccgccagacaacatgtggtctagccagaggttccaggcccacctgcaggagatgggtgccccaaatgcttggtccaccatcatcgtgcctggcatgaaggatgctgtgatccacgcacttcagacctcccaggacaccgtgcagtgtcggaaggccagctttgagctctatggcgctgacttcgtgttcggggaggacttccagccctggctgattgagatcaacgccagccccacgatggcaccctccacagcagtcactgcccggctctgtgctggcgtgcaagctgacaccctgcgcgtggtcattgaccggatgctggaccgcaactgtgacacaggagcctttgagctcatctataagcagcccgtcaccacttccccagcctccacaccaaggcccagctgccttctccccatgtactccgacaccagggccaggtcctcagacgacagcacagcaagctggtgggcactaaggccctgtcgaccacaggcaaggccttgaggactctacccacggctaaggtcttcatttccctcccaccgaaccttgatttcaaggtggcacccagcatcctgaagccaagaaaggtgggcctcgacctgtgactcacacccagtggacagtgctgagcacggggtcagggctggagggcacaggcagagggcagctcccaggctggctggcaccccaagggaagagctggtctccctcagaagccccttcctccacagacttctgatcatctccctcttctcccctcctttcacaccgaggctcctgctctcctgtgcctccgaggcccccagctggaagtgccttgttgcctctgccctttgaagtcggaacaattcctagcacctgtcggaaggtcaaggccaaaggcaaattcaaggccagactgtgacaaacccagggctgaggcctgccccatgaagaggctgagccccctgaaacccctgccccttgttggtacattccagaggcgcaggggcctgggggatatgaagctagggaagcccctgcttcgattccccactgcccttgtcctggatccaacaccaaataaaaagaaacaagtgaagtatttgg

SEQ ID NO: 1766 - DNA, 1693 bp, Homo sapiens
gaagcacttgctggaaacaagcactttgccaataaaaacgagagaggccttacctgaaagtggggaattgctagatgtgtggactgagcaacaggatatccatgatgcacatggcttgagataccagtggggcggctcccatagcaacaagaagcttttgtcctccttgggaatagacacccgaaacattctcttcacgggcaataagaagcagcctgttatagtgcccatgtatgcagcaggattgggtatgttagagcccaccaaggaaccactgaaaccactttctgctgcagaaaaaatagcttccatcggtcagacagccaccatgtcaccagatatgaacacatgtacatctgatcagttccaggagtctctaccacccgtccagtttgactggagtagcagtggccttactaaccctttagatggtgtggatccggagttgtatgagttaacaacttctaagctggaaatctccacctcaagcctcaaagtgactgatgcatttgcaagactcatgtctacagtagagaagacaagcacatctaccagtaggaaaccgaaaagagaagagcacctaagtgaagaagctatcaaggtgatcgctggccttcctgacttaacattcatgcatgccaaggtgttgatgttcccagccacgttaacaccttccacaagctctcaagaaaaagcagacggataactgatgtgaattggacagtttctattgcttttccttttttccatcccttccctaccatcaaaagcatacctgctctaattaaaaaaaaaaaaaaaaaaaaaaattcaagttcagctgatttgttggtaagccgcactagaaaggtatacatagtaatgtatatttatttacatactgaagtcctaaatttatattagaaaaatgtaaataatcgggggtaaacatttttgaagatttattctttttgtgttgctggggtgtatacatttatgtctttgtgaaatacactggtggtgtccttcttacaaaacttttgaaataaaaaaaaaactcaaatcttcactgtctgtgaaatccccttcagtcttttcagattgcattgactgtcctcttgatttttcatattacatgtcaaattacttttgctatcataaataagctccaaagtcccccatttaatttttttttaattttgtgtatgatgggtttcagatctggcttttgttaacattttggggcttttttaatcttttcaatctggcgtattgctgtttgaccttttgcaaggtacttaattgctcttttgttatagggtatggatcattgtcagaacttgattggaggggtttaaagagattgtgtctgtttaaaatcagtatgattcagagaaggaccaaattatatgaatgtcttacaatggaatttacttgttactgatttttttgttctattgtaccactattttttgaggattttgcacagtgtaaaatgacataatcatagattgctatggtttaggctgtatatacagtgaaaactatgggttttaaatgtttggggaaattcctatggaaaaaagagagacatgtagaagaacctctaacaaggttaatgtgcatgcccaaggtcttttgaaatttcagtgtgtaaatttccttttagcttatacaaaaataaaataatttaaaagaaaaaaaaaaaaaaaaa

SEQ ID NO: 1767 - DNA, 1893 bp, Homo sapiens
atttaggatatgttcaaggaatgagtgatttactttcccctcttttatatgtgatggaaaatgaagtggatgccttttggtgctttgcctcttacatggaccaaatgcatcagaattttgaagaacaaatgcaaggcatgaagacccagctaattcagctgagtaccttacttcgattgttagacagtggattttgcagttacttagaatctcaggactctggatacctttatttttgcttcaggtggcttttaatcagattcaaaagggaatttagttttctagatattcttcgattatgggaggtaatgtggaccgaactaccatgtacaaatttccatcttcttctctgttgtgctattctggaatcagaaaagcagcaaataatggaaaagcattatggcttcaatgaaatacttaagcatatcaatgaattgtccatgaaaattgatgtggaagatatactctgcaaggcagaagcaatttctctacagatggtaaaatgcaaggaattgccacaagcagtctgtgagatccttgggcttcaaggcagtgaagttacaacaccagattcagacgttggtgaagacgaaaatgttgtcatgactccttgtcctacatctgcatttcaaagtaatgccttgcctacactctctgccagtggagccagaaatgacagcccaacacagataccagtgtcctcagatgtctgcagattaacacctgcatgatcactgttcttgctttttgggaagagacactttgttgcaaccctttttcaagtacttgaaagttgaaaatttgaaatcttggtattgatcatgctttaaggtttatgtaaagaaagtgtactgatgttcttacattaaagctttacaaagatttaaactaattatttttgtagttacttctaccaaatagcctttccttttcgataacattcctcagtatttttatagccaagtacattttattttcttgctgatgaactggaattggataaatattgcaagtggatgagttggaaattatgcactttgaaaaacattcactttgtttaagcttattgggtttcagatttgattaaattaaatgtggaggctttctatagcattctaagctgagaagtagattgttacccagtaatgaaataaaaaataaaaataaaaggatttttttctctattgtttacgacagtactcagcttaaatatttatgctggtcaaatgtgatttaaattggacattttcatcaatgcagtctaatgtgtagataaatatttcaaccataataagtggattggcagtatattttttacattgaacttttcttcacttgtatataaagattatatataagtacttatttatgagtataagaaaggttaggcatattttcattaactgaataaacgacttgatttatataacctggtttatcaaaatttaacatggcttcagtatgagatctttttcaaaactattttcttaaacatttatttcatgagattatgttcaaccctgtacctggtgtaattttaaaattaattgcttgtaacctcactttactaataatgtttattatctttcctaataatgcattaactgattaatcaggtgtttaaatttttataaaatactcttgcaaaaagtttatttgaaaaatttctagatggtctcatgagtttcaaaataataatttttgtgtatgaacaaagctgttgtttttaccatgcagtattgcatgattttaagttatgtggaattaacataactgattttgttttaattgtaagttgttaactcctgtatatatcattaaaataaatctgaagttgaaaaaaaaaaaaaaaaaaaaaaaaaaaaaaaaaaaaaaaaaaaaaaaaaaaaaaaa

SEQ ID NO: 1768 - DNA, 1383 bp, Homo sapiens
ggcacgaggctccagcatggaggaggccaccggctgtgcagggttcaatctcatccacttggtggccacgggcatctcctgcttcttgggctctgggctcctgaccctagcagtgtacctgtcttgccagcactgccagcgtcagtcccaggagtccacactggtccatcctgccacccccaaccatttgcactacaagggcggaggcaccccgaagaatgaaaagtacacacccatggaattcaagaccctgaacaagaataacttgatccctgatgacagagccaacttctacccattgcagcagaccaatgtgtacacgactacttactacccaagccccctgaacaaacacagcttccggcccgaggcctcacctggacaacggtgcttccccaacagctgataccgccgtcctggggacttgggcttcttgccttcataaggcacagagcagatggagatgggacagtggagccagtttggttttctccctctgcactaggccaagaacttgctgccttgcctgtggggggtcccatccggcttcagagagctctggctggcattgaccatgggggaaagggctggtttcaggctgacatatggccgcaggtccagttcagcccaggtctctcatggttatcttccaacccactgtcacgctgacactatgctgccatgcctgggctgtggacctactgggcatttgaggaattggagaatggagatggcaagagggcaggcttttaagtttgggttggagacaacttcctgtggcccccacaagctgagtctggccttctccagctggccccaaaaaaggcctttgctacatcctgattatctctgaaagtaatcaatcaagtggctccagtagctctggattttctgccagggctgggccattgtggtgctgccccagtatgacatgggaccaaggccagcgcaggttatccacctctgcctggaagtctatactctacccagggcatccctctggtcagaggcagtgagtactgggaactggaggctgacctgtgcttagaagtcctttaatctgggctggtacaggcctcagccttgccctcaatgcacgaaaggtggcccaggagagaggatcaatgccataggaggcagaagtctggcctctgtgcctctatggagactatcttccagttgctgctcaacagagttgttggctgagacctgcttgggagtctctgctggcccttcatctgttcaggaacacacacacacacacactcacacacgcacacacaatcacaatttgctacagcaacaaaaaagacattgggctgtggcattattaattaaagatgatatccagtcaaaaaaaaaaaaaaaaaaaaaaaaaaaaaa

SEQ ID NO: 1769 - DNA, 3743 bp, Homo sapiens
gcaaaggtgactggcttcagtgaaggtgtggtggatagtgtcaaaggtgggttttccagcttctcccaggccacccattcagcagcaggcgctgtagtctcaaagcccagagagattgcctcactcattcggaacaaatttggcagtgcagacaacatccccaacctgaaggactctttagaggaagggcaagtggatgatgcggggaaggctttgggagtgatttcaaactttcagtctagcccaaaatatggtagtgaagaagattgttctagtgccacttcaggctcagtgggagccaacagcaccacagggggcatcgctgtaggagcatccagctccaaaacaaacaccctggacatgcagagctcaggatttgatgcactactacatgagatccaggagatccgggaaacccaggccagactagaggaatcctttgagactctcaaggaacattatcagagggactattccttaataatgcagaccttacaggaggagcgatatagatgtgaacgattggaagaacagctaaatgacctaacagagctccaccagaatgaaatcttgaacttgaagcaggaactggcaagcatggaagaaaaaatcgcgtatcagtcctatgaacgggcccgggacatccaggaggccctggaggcatgccagacgcgcatctccaagatggagctgcagcagcagcagcagcaggtggtgcagctagaagggctggagaatgccactgcccggaaccttctgggcaaactcatcaacatcctcctggctgtcatggcagtccttttggtctttgtctccactgtagccaactgtgtggtccccctcatgaagactcgcaacaggacgttcagcactttattccttgtggtttttattgcctttctctggaagcactgggacgccctcttcagctatgtggaacggttcttttcatcccctagatgatgctggcacagaaggcattgttccctaccctctggcgagtgcatgcagcagagagttagacagcaacttacctactctgaagttttctacaacaaaaaaagagttgagtgaatctgtttacatttagaataatgtttttttcttcaagagacgcaattgcaatagtattttttagattttatccaagaagttttttgggcgaaaatcttggatcatttttatgtagcatgattttccttgggatgcaaatcttaaaacagtcctttaatatgaaccaacaatctggagcacaccgaagggcaatctaaattgtggcttgaaggactgcactaaaacccactaaaaagatgcgaaaacctgatgagggcaaaccagttaaacctaacaccctgccttgtctgggctcatcacctctccctatcccagactaactttactgtgaaatcctaccacattccatgtctgaatttttggattcggggtggattttcgttgtccgtggaagaacacatggatctctctggctttctcacccaagttggccacttacgctaatcctggaagtatgatcacttttgaacctgccccttaaccttgacgaggatacaaaagtgaaagcatcatcccccaaaggatcactgcacagtcctactacagtatttttaagtagccctctaaatacttaattttaagcaaaatcccttggccgcacttttaaggtttttttatatgtgtatagttaccaacctaaaaataaaaaatccgaacagcatacttgaagaatgtaatactcaaactctcagtgcttccttatggtttctaataggattttttattattgttattattattattgggtttttttggacagggttgggagggtcttttatttttcctttgaaataaagaagtgatgtttttaaatgaagaaatgtgtggatatttaagtgtgctgctccctcttgtcttgaaacagtttgagtaagaaagtcttgctgtaaatgctgccctctgccgcctttgttttgagatgcagtttaaactccctctggctgctgctgctgctttttggtgtcccgacatacctacgcccccgttttatgggtttggcttagttgaagaggaaagggttgtgcaaggagagcaggaggctgtttccaaaaaccagtgtagtaggatagggatttttttttttttttttgccccaagaaaacgttcacccagtgatcttgggctggggttgtctttaggaaaagttgagactataagagtcataaataagtccttgtgtttccttaatttattttgttaacacccctaattacaaccaaagtgatgatgtggagtcttctgtcttcattttggccccagcattcttaatttcaaagctttattctgtctgcctaagagaatcaaccaaaggtgattctcctaaagagcagtgaaggaaatgtcaggttagcaggacccaagttttgggtgtgaaatgttgccagcttcctataatgtaaacggacttgttaacctaacctaattatgctcagtggacttctatagatggttttgaaaaatgaactgagctgccttcccgcatcgcataaccagttccatcatcctggtggaacttgaacatttagagtttatctagagagcttggttaatctttccatattatttgtagtattggtcacaaatgctgttccctcttagcctcattctgtgcaaccaagtgcatataagatgccctgaaaagagtaacaaagtatgctttgcctgtttccacttaccaggaaattccttcagaactagattagcattgccctgcctgtctgaaaggacagtttacctaatggtgccagcctccttttgctttggcaagctggatttctcagagccagcatgttgtttccataactactttgatattttaactcaggtactccagtcttcaccccaacctcagctgattgtagtacacctgctagctctgttgccccctcaaaactgcacccagagcagggccacaagggtgcttttttttctttaaaaaaaaaaaaattagaaccaattcatgttcatgccaaaaacaaattgtccccaagcctatatgtattaaaatgttaactttgcctaaaaatattgcagtgactttttaggcaggagtgccaaaggacactatgaactttttgaactgacagtttctcctaactttctgctttagcgtaattgctcagagtagagagcccccacaaagttatttaaaagatgccctagcagcaatccaccagtttttctaagctagaacctttgagtcccccaaactgcctgaagacttaagttttgtgggcactggaagtcactttgatagatggattgaaactgttcctatttgccctgggacggtttctatctatcaaaggaaggttttcacctgtagaaagccccctgcctccagccaaatagtcccatgctgactttctatcttcctttctcaaactgtcttaggaaggaccttcagtgcagatcaggtgcagtaatggctttcttgtcccttaattattcaccagacccagaagttgtacgcatttaatgctgtttgtaaccatgcatctgttttcattctttgctgtaccttttgctgcccatcctgttacttttgagtttctttcattgtggttgttcttgggttcttttgtcttgtcagagctcttctataacctcgctctaatggcttaacagttgttctgggtggaaacgtcccctcatttgaatgctcctct

SEQ ID NO: 1770 - DNA, 882 bp, Homo sapiens
tgtgtaggatgcgccaagacccagcacacccccacgtggttgccacaggtgggaaagagaatgctttgaagatatgggacctgcagggctctgaggaacctgtgttcagggccaagaacgtgcggaatgactggctggacttgcgggttcccatctgggaccaggacatacagtttctcccaggatcacagaagcttgtcacctgcacagggtaccaccaggtccgtgtttatgatccagcatccccccagcgccggccagtcctagagaccacctatggagagtacccactaacagccatgaccctcactccgggaggcaactcagtgattgtgggaaacactcatgggcagctggcagaaattgaccttcggcaagggcgtctactgggctgtctaaaggggctggcaggcagtgtgcgtgggttgcagtgccacccttcaaagcctctactagcctcctgtggcttggacagagtcttgaggatacacaggatccagaatccacggggtctggagcataaggtttatctcaagtctcaattgaactgcctcctcttgtcaggcagggacaactgggaggatgagccccaagagcctcaagaacccaacaaggtgcccctagaagacacagagacagatgaactttgggcatccttggaggcagctgccaagcggaagctctcgggtttggagcagccccaaggagctctccaaacgagacggagaaagaagaagcggcctgggtccaccagcccctgacgcccctgtgcccactttgtaaataaactgctgaacacccaaaaaaaaaaaaaaaaaaaaaaaaaaaaaaaaaaaaaaaaaaaaaaaaaaaaaaaaaaaaaaaaaaaaaaaaaaaaaaaaa

SEQ ID NO: 1771 - DNA, 2106 bp, Homo sapiens
agcgcagctatggctgctggcgtaccctgtgcgttagtcaccagctgctcctccgtcttctcaggagaccagctggtccaacatatccttggaacagaagatcttattgtggaagtgacttccaatgatgctgtgagattttatccctggaccattgataataaatactattcagcagacatcaatctatgtgtggtgccaaacaaatttcttgttactgcagagattgcagaatctgtccaagcatttgtggtttactttgacagcacacaaaaatcgggccttgatagtgtctcctcatggcttccactggcaaaagcatggttacctgaggtgatgatcttggtctgcgatagagtgtctgaagatggtataaaccgacaaaaagctcaagaatggtgcctcaaacatggctttgaattggtagaacttagtccagaggagttgcctgaggaggatgatgacttcccagaatctacaggagtaaagcgaattgtccaagccctgaatgccaatgtgtggtccaatgtagtgatgaagaatgataggaaccaaggctttagccttctcaactcattgactggaacaaaccatagcattgggtcagcagatccctgtcacccagagcaaccccatttgccagcagcagatagtactgaatccctctctgatcatcggggtggtgcatctaacacaacagatgcccaggttgatagcattgtggatcccatgttagatctggatattcaagaattagccagtcttaccactggaggaggagatgtggagaattttgaaagactcttttcaaagttaaaggaaatgaaagacaaggctgcgacgcttcctcatgagcaaagaaaagtgcatgcagaaaaggtggccaaagcattctggatggcaatcgggggagacagagatgaaattgaaggcctttcatctgatgaagagcactgaattattcatactagggtttgaccaacaaagatgctagctgtctctgagatacctctctactcagcccagtcatattttgccaaaattgcccttatcatgttggctgcctgacttgtttatagggtccccttaattttagtttttagtaggaggttaaggagaaatcttttttttccacagtatattgtaagagagtgaggaatacagtgatagtaatgagtgaggatttcttaaatatacttttttttttgttctaggaatgagggtaggataaatctcagaggtctgtgtgatttactcaagttgaagacaacctccaggccattcctggtcaaccttttaagtagcatttccagcattcacacttgatactgcacatcaggagttgtgtcacctttcctgggtgatttgggttttctccattcaaggagcttgtagctctgagctatgatgcttttattgggaggaaaggaggcagctgcagaattgatgtgagctatgtggggccgaagtctcagcccgcagctaagtctctacctaagaaaatgcctctgggcattcttttgaagtatagtgtctgagctcatgctagaaagaatcaaaaagccagtgtggatttttagactgtaataaatgaggcaaaggatttctattccagtgggaaggaaacctctctactgagttgtgggggatatgttgtatgttagaaagaaccttaaggagtccttgtatgggccatggagacagtatgtgataacataccgtgattttcatgaagaaattcttctgtcttagagttctcccctgctgcttgagatgccagagctgtgttgttgcacacctgcaaaacaaggcacatttccccctttctctttaaagccaaagagagatcactgccaaagtgggagcactaaggggtgggtggggaagtgaaatgttaggcgataaattcctgagcaccttgtttttcttccaaggttcgtagctcctctctgcccttccaagcctgtaacctcggaggactatcttttgttctttatcctttgtcttgtttgagtgggtcagccccagaggaactgataagcaaatggcaagtttttaaaggaagagtggaaagtactgcaaataaaaatccttatttgtttttgt

SEQ ID NO: 1772 - DNA, 2120 bp, Homo sapiens
aacgtccgcgggcgcggggtgtgtcgggtgtcgacggcggcgctttgcggccggtcgtgcgggtcgggcgcgggcgggcgcggcggcagtggcgcgcacaggtgattgactggccagctgcctgaaggagcgccaggtcctccttgctggcaggtggcgaagcccattggggcggcggtgcagaccgcggcggcggctgcggcggtctggctcgggaggcgttcctggggccaaggccatggccccgcggctgcagctggagaaggcggcctggcgctgggcggagacggtgcggcccgaggaggtgtcgcaggagcacatcgagaccgcttaccgcatctggctggagccctgcattcgcggcgtgtgcagacgaaactgcaaaggaaatccgaattgcttggttggtattggtgagcatatttggttaggagaaatagatgaaaatagttttcataacatcgatgatcccaactgtgagaggagaaaaaagaactcatttgtgggcctgactaaccttggagccacttgttatgtcaacacatttcttcaagtgtggtttctcaacttggagcttcggcaggcactctacttatgtccaagcacttgtagtgactacatgctgggagacggcatccaagaagaaaaagattatgagcctcaaacaatttgtgagcatctccagtacttgtttgccttgttgcaaaacagtaataggcgatacattgatccatcaggatttgttaaagccttgggcctggacactggacaacagcaggatgctcaagaattttcaaagctctttatgtctctattggaagatactttgtctaaacaaaagaatccagatgtgcgcaatattgttcaacagcagttctgtggagaatatgcctatgtaactgtttgcaaccagtgtggcagagagtctaagcttttgtcaaaattttatgagctggagttaaatatccaaggccacaaacagttaacagattgtatctcggaatttttgaaggaagaaaaattagaaggagacaatcgctatttttgcgagaactgtcaaagcaaacagaatgcaacaagaaagattcgacttcttagccttccttgcactctgaacttgcagctaatgcgttttgtctttgacaggcaaactggacataagaaaaagctgaatacctacattggcttctcagaaattttggatatggagccttatgtggaacataaaggtgggtcctacgtgtatgaactcagcgcagtcctcatacacagaggagtgagtgcttattctggccactacatcgcccacgtgaaagatccacagtctggtgaatggtataagttaatattaaacacaaactaccacctacctccctcaccaaagcccataaaaataaaaaattataacaaaccctgagaaccaaaatgaacggaaatctgttcgcttcattcattgcccccacaatcctaggcctacccgccgcagtactgatcattctatttccccctctattgatccccacctccaaatatctcatcaacaaccgactaatcaccacccaacaatgactaatcaaactaacctcaaaacaaatgataaccatacacaacactaaaggacgaacctgatctcttatactagtatccttaatcatttttattgccacaactaacctcctcggactcctgcctcactcatttacaccaaccacccaactatctataaacctagccatggccatccccttatgagcgggcgcagtgattataggctttcgctctaagattaaaaatgccctagcccacttcttaccacaaggcacacctacaccccttatccccatactagttattatcgaaaccatcagcctactcattcaaccaatagccctggccgtacgcctaaccgctaacattactgcaggccacctactcatgcacctaattggaagcgccaccctagcaatatcaaccattaaccttccctctacacttatcatcttcacaattctaattctactgactatcctagaaatcgctgtcgccttaatccaagcctacgttttcacacttctagtaagcctctacctgcacgacaacacataaaaaaaaaaaaaaaa

SEQ ID NO: 1773 - DNA, 2605 bp, Homo sapiens
atacctttgagtcttgcagaagagaaactaccaacaggcattaatcctctcactctacacatcatgagaaggacaaaagaatatgtaagtaatgacgcggcacagtcagatgatgaagagaagttacagtctcagccaacagatactgatggtggaaggttaaaacagaaaacgactcaactaaagaagtttcttggaaaatcagtaaagagagcaaagcaccttgctgaggaatatggtgaacgtgctataaataaagttaaaagtgttagagatgaagtgtttcatactgatcaagatgatccttcatcaagtgatgatgaaggaatgccatacacaagaccagttaaattcaaagcagcacacggtttcaaaggaccttatgattttgatcagatcaaagtggtgcaagatcttagtggtgaacatatgggagctgtttggaccatgaaattttctcactgtggccgattacttgcctcagctggacaagacaatgtagtgagaatatgggctttaaaaaatgcttttgactatttcaacaatatgcgaatgaaatacaatactgaaggacgtgtgtccccatcaccctctcaggaaagtctaagttcatcaaaatcggatacagatacaggggtatgcagtggaactgatgaagaccctgatgataaaaacgcaccctttcggcaacggccattttgcaaatataaaggacatactgctgatctccttgatctttcatggtctaaaaactactttcttctttcttcttcaatggataaaacagtcagattatggcacatttctcgaagagaatgcctttgctgttttcaacatatagatactgccatagcttttcatccaagagatgacaggtattttctaagtgggtctttggatggaaagctccgcctttggaacatacctgacaaaaaagtggctttgtggaatgaagtagatggtcagacaaaattgatcacagctgcaaatttctgtcagaatggcaaatatgcagtgattgggacatatgatggcagatgtattttctatgatacagagcatttgaaataccatacacaaatacatgtccgatctactagagggcgcaacaaggttggaagaaaaattactggcattgagcctttacctggagaaaataagatattggtaacctcaaatgactccagaatcagactatatgatttgagagatttgtcactatccatgaagtataagggttacgtcaatagcagcagccagatcaagcaagtttcagccatgattttacttacctcgttagtggttcagaagataagtatgtttatatctggagtacctaccatgacctaagcaagtttacttcagtcaggagagatcgtaatgacttctgggaaggtattaaagcccacaatgcagttgttacatcagccatctttgcaccaaacccaagtttgatgttatctttggatgtgcaatctgaaaaatcagaagggaacgagaaaagtgaagatgctgaagttttggatgccacaccttctggtattatgaagacagataacacagaagttcttctctctgctgacttcactggagcaatcaaagtgtttgttaataaaagaaaaaatgtatcttaatttgaaatggcatttaaaataaacatatcagtaagtttctatatgtatcaaaactgaaaaaatagtgttccaggctaacatacttttttaatttttattgaaagttgttcaaatataatatattctttgagaggcagtgttaatgatctaggaaaccctgggctgatagagtagaaaggaatatggctagaataacattgccaaacattaggctttatgttttgttatgtttgtgttttcgttgtataattatgaacatgcacaagtttctgcatgaaaagatattaatatattaatcacatgtatgtgccttttggttacatgcattaaatctaacagagttaaattatttcagtggctcttttggcctcttactaggggggatagtcttgtttctagcttaaacaattttttttttgcacaaaatttcatttttaataaaagtggtatcttttgactgagttattgttttgaaaatggtatataggtttccagtaggtcaacaaccatatgtaaatggtttttataaatttctcaatttggggacaagatttttttgtggtctaaattgtgggcttaagattcttttctttatatgtgtacatataatttttttttctttgccacactggagcacaatgtttctatgtaaagaattattttcattctttatccatgagcaccaggctttgctcacttaaaaaaaaattaagccacattaaggagtgagtcttcttttttacaataatgtaaaaattaaactgtttacatttttttaaagcattgtagtttttaaaaattaagctgttttgttttgtgttgttgaatttgaaagcctttgtaaatatcaatataatgtaccaatgaaataacatctggggcaatgaaaccctgatcatgttgttgatggttagcatatgtttctgaaaattaaatatgtattattaaaagttggtctccaacacttgttt

SEQ ID NO: 1774 - DNA, 1873 bp, Homo sapiens
agaagagctttttactaatttatttgtcagtgttccctatttgttacttaaccatgatcctccagattttttggagtattcttttctaaccttaaccctgccaaaccttgatccattttgacatttgttatgcactatttttatatctctgtgagagatttttccaacagtcagctattttatggcacacttttttttgactgatgacatctcctttgctatacctcaatttttggaatttagagaagaaatcagtagttttgcaatgttaattatttagatatttaatttcgcagatttttaaactttattttcataatttctgcttaatgtttaaaattgaagagccttttcatgtattaaataatgaacacaaattatataattaaaataattggagatgttgaaaatcattttcccttcttaaacagaaataaatatttggaatgaaggggaatgtactagaacaccctttttgccatgggtaaaaataacagaaatgtatggtttgttttaccttcatttctgtataagtaaagcttattagtctgttttattcctttcccacttcacccctacctcttttttgttttattttgtttttgccttttatgtactacattcttattttctaactgttaaacactgtattggagtttttttttttttttaatttacagatcatatttattttactatttttgtagaaaattaattttgattgtatttttgtattttaaaagcttcttcacttgtgttccctaaatattcatattgctgcccaaaagtatgactgtggaggaaaaaaaatactttaaaaatccacactttttgttaagaaggaaacatttagcatttatatatttgtgtatggaaaacacttgatattttatccctgttgcatctggctgcacagagcctctcctcaaagatgctacaaaacttgaatataacacattttggaaggctgactaacctcgattctgtgttgtgatgtgcaatactgtttctaatgtttgtataaaaaaaaaaacagtgtaaacctttttaatgcaaatttatttttttcattgcatattttgcagattttatccacagtgtcattttttactgtcagaaaagataccccttttgtcattgcaactattttttaaatccagaaatctttgtactgatgtaaatgattgtagttattttggatagtgttttgctaacaaaaggagagacttttttcatgcatatttctattttgtttttttgggttttattttattttaatagtagtaaaatacttggaataatttttcatattcttgtcattaatattattttgtatttttatgtggaaatatataattttatgacactaattgctaaagtttattttatgttgaattatttttggagctgaaatctttgtaatattaaagcaactagtttctaattcccagtttctgtatagaatcgcacaagtggtttatggagtgtttggattgtaattataaatggttctttgatatgcaaattaatattttcagttgatttcattttatattcctaatggggtgttaaagccgttttttatttttttctaaataaaaagagaacccatgcttttatggacactaggtaaacgccttcagcttaaatttttcgttaaatattttagtttattttattgttatcttccaggtgtctaaatctccagtctgtctgttgtactggtaatttaactctgtaatggaatagcttgctgccaactatttatattaagtaatttttaaatatttgtaatattgttgactgactaataaactattaagttattggcaaaaaaaaaaaaaaaaaaaaaaaaaaaaaaaaaaaaaaaaaa

SEQ ID NO: 1775 - DNA, 2432 bp, Homo sapiens
gcgccagcaggaagtgggagaagaggcgacccaaggcgggctggcgggctggcggcagtcgctacttgcctagtagcctcagccgctgtgggctcctggggagatggaggggccggggctgggctcgcagtgcaggaatcacagccatggcccccaccctccaggatttggtcgatatggcatctgtgcacatgaaaacaaagaacttgccaatgcaagagaagctcttcctcttatagaggactctagtaactgtgacattgtcaaagctactcaatacggaatttttgaacgatgtaaagagttggtagaagcaggatatgatgtcaggcaaccagataaagaaaatgtgtcgcttcttcattgggctgctattaacaacagactggatcttgtaaggttttatatttcaaaaggtgctgttgtagatcagttgggtggagatttaaattcaactcctcttcactgggccatccgacaaggacatttacctatggtcatattattactccagcatggtgcagaccccactcttattgatggagagggattcagcagcatccacctggcagtattgtttcaacacatgcctattatagcatatctcatctcaaagggacagagtgtgaatatgacagatgtaaatgggcagacacctctcatgttatcagctcacaaagtaattgggccagaaccaactggatttcttttaaagtttaatccttctctcaatgtggttgataaaatacaccaaaacactccacttcactgggcagttgcagcaggaaatgttaatgcagttgataagcttttggaagctggttctagcctggatatccagaatgttaagggagaaacacctcttgatatggctctacaaaacaaaaatcagctcattattcatatgctaaaaacagaagccaaaatgagagccaaccaaaagttcagactttggaggtggctgcagaaatgcgagctcttcctgctgctgatgctttctgtgattaccatgtgggctattggatacatattggacttcaattcagattcttggcttttaaaaggatgtcttctagtaacactgttttttctgacatctttgtttccaaggttcttggttgggtataagaaccttgtatacttaccaacagcctttctgctaagttctgttttttggatatttatgacttggttcatcttattttttcctgatttagcaggagcccctttctatttcagtttcattttcagcatagtagcctttctatactttttctataagacttgggcaactgatccaggcttcactaaggcttctgaagaagaaaagaaagtgaatatcatcacccttgcagaaactggctctctggacttcagaacattttgtacatcatgtcttataaggaagccattaaggtcactccactgccatgtatgcaactgctgtgtggctcgatatgatcaacactgcctgtggactggacggtgcataggttttggcaaccatcactattacatattcttcttgtttttcctttccatggtatgaggctggattatatatggatctttcatctatttgtccagtcattgtgccacaacattcaaagaagatggattatggacttacctcaatcagattgtggcctgttccccttgggttttatatatcttgatgctagcaactttccatttctcatggtcaacatttttattattaaatcaactctttcagattgcctttctgggcctgacctcccatgagagaatcagcctgcagaagcagagcaagcatatgaaacagacgttgtccctcaggaagacaccatacaatcttggattcatgcaggacctggcagatttctttcagtgtggctgctttggcttggtgaagccctgtgtggtagattggacatcacagtacaccatggtctttcacccagccagggagaaggttcttcgctcagtatgaagaaaagcaacccaaaactctcaatctgatttgtttttgtttatgtcgatgccctgtagtttgaaagtgaagtaaagatttagaattcacctaagtccaaaggaaaacacgtggtttttaaagccattaggtaaaaaaagttctcaataaaggcattacaattttttaggtttagaaagatggacttttctgataaatcttggcagacatctaaaaaaaaaaccatatttttcacaagaaaatgcaagttactttttttggaaataatactcactgattatggataaaatggaatattttcagatactatattggctgtttcaaaatagtactattctttaaacttgtaatttttgctaagttatttgtctttgttgtatctataaatatgtaaaaaatatttaaatagatgtacctgttttgctttcacacttaataaaaaattttttttttgtagttg

SEQ ID NO: 1776 - DNA, 1964 bp, Homo sapiens
tgactttttttatttttttaaagtatgtatgggatctcatgttgcccaggctggtcttgaactcctggccttaagtgtttctcttttgcctcctaaagagctggaactacaggcatgggtcaccatgccctatatattttagatcttgattcaagtgcaccagttgaacatacattaaggaatcttgctgaccatgtatgtggttaggtttttaagaaatttggaggtaatgatgaatctaggatttgctcagaagcttccgggatggggttgtaggcaatgaatgggatcaacatgaagtaagatcacatccccaaaaggttgggaaatacgggtccattagatacaaatttcttacaatgcagaaaatgaaaaacctgcgtatttcacctgggttactgtgacagtctcaactggtcatcttccctgtatttcagcatcagccagggtactgactttgaaatggattatagcactgcttcaaatcctgcaacaggttcttttcaattttttctttttaaaatagtttccccattctacctgcagctgtttttaactcagtttttctgacttctgcactatagctgaactgacctggctattcctcgataccaagtcctctgtcattaagcatttaagttgtcttttccctttggaatgctctcagctgagctgtgtgtctaactcacttaccttcaggtctattcagtgaatcctgccttgatcactctattaaaaataggggacctgctccttaaacttgtcctactgtctctttacccttctccacttgtttttgtccatacatttgtagttccgatatttacaatgtgtgtattcgttatatgctttttttctgctggaatgtaactttaacaaggatgtaattttgtactctggtgtattccaactacctagaacgatggcatgtagctgtttactgagccggttcctggattgccagggaactcagtaatggcagtgggactggaagatgtttgggaaggtattgacaggatttcaaaacagtacgaggcttgtgggagaaatttccaagtggcaatattacagttgggtggagatgttcatgagaggatcagcttgtgggtagtagctgctgtgggagtaaatgggatttctttgagcatgaaatggactggcatgctgggtctgaccttgataggataacttacaggctggttgtagctcaactgttttttttgtttttttttaatttgggtataataaatgagccgttgttccccagggaaaacgtttcttctgtgtctatggataagcacttgtgcactatttttgcagtttttagatgtaggtgtccacacatttttgagatggggtctctgtcacccaggttggagtgcagtggtgcaatcttggctcattgcaacctctgcctcccaggctcaagccatccacctcagccttctgtgtagctgggaccacaaatacgtgccaccatatctagctaattttttgtagagagggttttgccatgttgcccaagctggtctcaaactcctggagtcaagcagtctgcccgcctcagcctcccagtcatggggttacaggtgtgagccaccacacaccggccacattttttgagaaaatatacccagaagtaacatactaagttggcacaaaaactaggcagaagggttcaggggaggcagtcttgggcagagcccatttacaatgccaaacccattcacattcagcagttcttaaaattgaccaggttgttagttgaattcaagtagtcagcatgaaccagtttatttggaataaatacattgaaaattaaacatgtcacaatgtactggcctcattttccagaggctctgtaaataccatagttgtgatgtttccagattgttatattgaatatacaataaacacaagttaaatttttcacaaaaaaaaaaaaaaaaaaaaaaaaaaaaaaa

SEQ ID NO: 1777 - DNA, 1893 bp, Homo sapiens; identical to SEQ ID NO: 1767

SEQ ID NO: 1778 - DNA, 4379 bp, Homo sapiens
aggaaactcccagggcccgcccaggacccccaagccgccgcggacgcagcccaggatggcggcccaggtgactctggaggacgcgctgtccaacgtggacctcctggaggagctgcccctgcccgaccagcagccctgcatcgagcccccgccatcctcgctgctctaccagccaaatttcaacactaactttgaagacagaaatgcatttgttactggcatcgcaagatacattgaacaagccaccgtccactctagcatgaacgagatgctggaggagggccaagaatatgctgtcatgctgtacacctggaggagctgctcccgggccatcccacaggtgaaatgtaacgagcagcctaacagagtggaaatctacgagaaaaccgtggaggttctggagcctgaggtcacaaaactgatgaatttcatgtacttccagagaaatgccattgagcgtttctgcggggaagtgaggcgcctgtgccatgccgagaggaggaaggacttcgtgtcagaagcctacctgatcacactgggcaaattcatcaacatgttcgctgtgctggacgagctgaagaacatgaagtgcagtgtgaagaacgaccactcagcgtacaagagggccgctcagtttttacgtaaaatggcagatccacagtccatccaggaatcgcagaatctgtccatgttcctggccaatcataacaagatcacacagtctctgcagcagcagctcgaagtgatttctggctacgaagagctcctggcagatattgtgaatctgtgtgtggattactacgagaacaggatgtatttgacgcccagtgagaaacacatgcttctcaaagtcatgggatttggtctgtacctgatggatgggagtgtcagtaacatctataagttggatgccaagaaaagaataaacttatccaaaatcgacaagtacttcaagcaactccaggtggttccgctatttggggacatgcaaatagaactggcaagatatatcaagaccagcgcccactacgaggaaaataaatctcgatggacgtgcacatcctccggcagcagccctcagtacaacatctgcgagcagatgatccagatccgcgaggaccacatgcgcttcatttcggagctggcgcgctacagcaacagcgaggtggtcacgggctcgggccgccaggaggcccagaagacggacgcggagtaccgcaagctcttcgacctggcgctgcagggcctgcagctgttgtcgcagtggagcgcgcacgtgatggaagtgtattcctggaagcttgtgcaccccaccgacaagtactccaacaaggactgccccgacagcgctgaagagtacgagcgtgccacgcgctacaactacaccagcgaggagaagtttgccctagtggaggtgatcgccatgatcaaaggcctgcaggtgctgatgggcaggatggagagcgtgttcaaccacgccatccggcacaccgtctatgccgcactgcaggacttctcccaggtgacccttagggagccgctgcggcaggccatcaagaagaagaagaacgtcatccagagtgtcctgcaggccatcaggaagaccgtgtgtgactgggagacggggcatgagcccttcaatgacccagccttgcggggcgagaaggaccccaagagcggcttcgacataaaagtaccacgccgcgccgtgggaccctccagcactcagctttacatggtgagaaccatgctagagtccctcattgcagacaaaagtggttccaagaaaaccttgagaagtagccttgaggggcccaccatattggacatagaaaaatttcatcgagagtcattcttctacactcacttgataaatttcagtgaaacgctgcagcagtgctgtgacctttcgcagctgtggttccgagagttcttcctggagctgaccatgggcaggaggatccagttccccattgagatgtcgatgccctggatcctgacggaccacatcctggagaccaaggaggcatcgatgatggagtacgtgctctactccctggacctgtacaatgacagcgcccactacgcgctcaccaggttcaacaagcagttcctgtacgacgaaattgaggccgaggtgaatctatgttttgaccaatttgtttacaagctagcagaccagatatttgcctattataaggttatggcaggaagtttgcttcttgataaacggttacgatcagaatgcaagaatcagggagccacgatccacctcccgccgtctaaccgctacgagacgctgctgaagcagaggcatgtgcagctcctcggcagatcaatagacctcaatcgtctgatcacccagcgcgtctcagcagccatgtataagtccctagaactggcgattggacgatttgaaagtgaagatttgacctccatagttgagctggatggcctgttggaaatcaaccgcatgacccacaagctgctgagccggtacctgacgctggacggcttcgacgccatgttccgggaggccaaccacaacgtgtcagcgccctacgggaggatcaccctgcacgtcttctgggagctcaactatgacttcctgcccaactactgctacaacggctctaccaaccggtttgttcggacagtgttaccattttctcaggaatttcaaagagataagcagcctaatgcacagcctcagtatctgcatggatccaaggctttgaacttggcctactccagcatttacggcagctaccggaacttcgtgggacctccacactttcaagtcatctgccggcttctcggctaccagggtatcgccgtggtcatggaggagctgctgaaggtcgtcaagagcctgctgcaaggcacaatcctgcagtacgtgaagacgctgatggaggtgatgcccaagatctgccgcctgccccggcacgagtacggctctcctggtatcctggagttcttccaccaccagctgaaggacatcgtggagtacgcagagctgaagacggtgtgcttccagaacctgcgggaggtggggaacgccatcctcttctgcctgctcatcgagcagagcctgtctttagaagaagtgtgtgacctgctgcacgcggctcctttccagaacatcttgccgcgagtccatgtgaaagagggggagagacttgatgccaaaatgaaaagactagaatcaaagtacgccccgctgcatcttgtcccactgattgaaagactggggacccctcagcaaattgccatcgcaagagagggggacctgctgacaaaggagcgcctctgctgcggcctgtccatgtttgaggtcatcctgacacggatccggagctttctggatgaccccatctggcgcgggcctctgcccagcaatggggtcatgcatgtggacgagtgtgtggagtttcacagactgtggagtgccatgcagtttgtctactgcattcccgtggggacacacgagttcacagtcgagcagtgctttggtgatgggctacactgggctggctgtatgatcatcgtacttcttgggcagcagcggcgttttgctgtgctggatttctgctaccatctacttaaagtccagaaacatgatggcaaagatgagattattaaaaatgtgcctttgaagaagatggtggagagaattcgcaagttccagattctcaatgatgagatcatcaccatcctggataagtacctgaagtcaggcgacggggagggcacgccagtggagcatgtgcgctgcttccagccgcccatccaccagtccctcgccagcagctgagggcacgcgctgcactccgtaactcaacatggcatgcctttctctccgtaaactatttagtgagatttttagggactatttttcagtatctctgtacctgttaaagggggtgcttttcgatctaaaaacttaattttataaaattgacttatttttctagactaaaattgtatatgcttttggtaattaggaactcttgagaatattggctgctgattgttgccatcacgttcctacaaaattgtttttctatgggatgttctggcagctgtgtcataaaatgctgctgggttcattcattcattccataagaaacttaataccagcaaatgcattaaatcccttgccagttaccattaactataactatttagcttttgtttagggatctttctgatgggcttttatgagcaatcttagttctaagtcattgttcccatcccttttttgtgtgtttcagaaaatagtgaacttgattcccctgcttccactaaatccagttgtgacaaaatctaacgtgacatcagatcgaaaggttatagaaataaaactaatgagatct

SEQ ID NO: 1779 - DNA, 1750 bp, Homo sapiens
tggtaactcaggcgccgggcgcactgtccgtagctgctggttttccacgctggttttagctcccggcgtctgcaaaatgaagattgaggaggtgaagagcactacgaagacgcagcgcatcgcctcccacagccacgtgaaagggctggggctggacgagagcggcttggccaagcaggcggcctcagggcttgtgggccaggagaacgcgcgagaggcatgtggcgtcatagtagaattaatcaaaagcaagaaaatggctggaagagctgtcttgttggcaggacctcctggaactggcaagacagctctggctctggctattgctcaggagctgggtagtaaggtccccttctgcccaatggtggggagtgaagtttactcaactgagatcaagaagacagaggtgctgatggagaacttccgcagggccattgggctgcgaataaaggagaccaaggaagtttatgaaggtgaagtcacagagctaactccgtgtgagacagagaatcccatgggaggatatggcaaaaccattagccatgtgatcataggactcaaaacagccaaaggaaccaaacagttgaaactggaccccagcatttttgaaagtttgcagaaagagcgagtagaagctggagatgtgatttacattgaagccaacagtggggccgtgaagaggcagggcaggtgtgatacctatgccacagaattcgaccttgaagctgaagagtatgtccccttgccaaaaggggatgtgcacaaaaagaaagaaatcatccaagatgtgaccttgcatgacttggatgtggctaatgcgcggccccaggggggacaagatatcctgtccatgatgggccagctaatgaagccaaagaagacagaaatcacagacaaacttcgaggggagattaataaggtggtgaacaagtacatcgaccagggcattgctgagctggtcccgggtgtgctgtttgttgatgaggtccacatgctggacattgagtgcttcacctacctgcaccgcgccctggagtcttctatcgctcccatcgtcatctttgcatccaaccgaggcaactgtgtcatcagaggcactgaggacatcacatcccctcacggcatccctcttgaccttctggaccgagtgatgataatccggaccatgctgtatactccacaggaaatgaaacagatcattaaaatccgtgcccagacggaaggaatcaacatcagtgaggaggcactgaaccacctgggggagattggcaccaagaccacactgaggtactcagtgcagctgctgaccccggccaacttgcttgctaaaatcaacgggaaggacagcattgagaaagagcatgtcgaagagatcagtgaacttttctatgatgccaagtcctccgccaaaatcctggctgaccagcaggataagtacatgaagtgagatggctgaggttttcagcagcaagagactccccaggtgtgcctggcctgggtccagcctgtgggcgcttgcccctgggcttggggctgccgtccccactcaggcgtgggctgcagcgctgtcagttcagtgtggaaagcatttctttttaagttatcgtaactgttcctgtggttgctttgaaagaacccttccttacctggtgtgttttctataaatcttcataggttattttgattcttctctctctctctctaagttttttaaaaataaacttttcagaacagttaaaaaaaaaaaaaa

SEQ ID NO: 1780 - DNA, 1929 bp, Homo sapiens
gggggagaatttccattaggcaagctgtatgcagtggaattttccttttaggagacacacaattaagactctctggttctgtccttgctttggagactttaagacatttcctaaagcacaaataaaagcctcgtatttccccattgagagttttgttccaaggaatatgaagtgagacatatgggtgagttataataatcaaaataatttatgaagagctgggtctgcaatagctagtctaaaaactacttgtgtgtcagtcctctggttatagtatataagagcctgaggaggtctggcaagatagatggtgtattatttatggatcaggctgctgcatacaaaccttgcatactattatgcagcttacctaactctcagactattctgagtaatgcttgcttgctaatgaatgtataggagaccacattgtaattgttcttagatgatggagtccatgcagtttcttagaaatcggtctcagtgcatgctgtgctttttcacatttgctctgggttatctgggaagtatcaggttctgggaggcaacagcattaagtgataagaaaaggagacattctggcaaagccaatctgcttaaaggcaaagtccagaacctggaacctagaggcctttctctctgcacgaaaaacaggtagtttgcagtctgagatatgggagagcttttaggctacacagcaacccaagggacctctcaccttttgctgagcttcaatcaggaagctatttgcctggctccagcagatgatgagataatgaggtagtgggttttttattactgttccattttgcaacatcctgcaacaccatcctgggagacaagagcattaccgagcttggctttcacgggggagggttgtattcagtaaaaaagaatagtaaatataaggtcactgagattctaagtaagatagtaaatctaaggtcactgagccaaatccttttcaataggcatatattaacaggctgcttattttggcggaggttacatatggatgaaaatgaatcttagtcactgaatattcatatacatttcccccaaaaccttagacattcatagtagattttaattagttagctttctaactagtcagatttctgcccaaagtgcttagtcaatagtaattaagatatagcttcaaaaatggctttgcttttgatttctactcatattcgtatggctccagaaaaatatttttttcatatttgacaatgtcagctccactttagaaattttcaataaccagatgagaaaaaaattaagaaattgctcaagggaaacatttgtaaatggatttgaaagattgagccaaattctgttgtcagttctaagcatgcagttctcacctccatttagtcccccatcagaacagaggtcaggaatttagctggggagcctaaatttagttcagcttacctttgagaatagcatcaattcagactctcttttcattatgttttcttttctttttccctctttttaaactacattgtgttagagtcgtagtctaggatcctgagagattttccattcttgtcaccattcacttgcattgtaaagattttctttgtctgttgttggcatagattcttttgtacatatttatttatttgtgtttatatatgtcaattggtttcctttcttagcttgatattgcctagctttgttgttttaattaactttctattagagggactgtatatattttttctaaatactttgtgaaatcatttttggtagcaatatctttgaatatgatgaataaaagtgactgtgagtgcaaatagaattagcagtaagaagctactctagctaatttgccatttcacttaaatggaaaatgtttttcaaataaatacttatgttgttcatgttccaagttattcaaaaaaaaaaaaaaaaaaaaac

SEQ ID NO: 1781 - DNA, 2013 bp, Homo sapiens
ccggttaggtttcccaacatctgtggttacctaatgtttaatattatagaactgtcctcagaaactttgtcaattttcacggctataaggaaacagaaggactcttttaattctgtatttatcatttactttctgtatatatagtttaataacctgcttgggtgtaatttgccaagcttgaattctttaatgcatttgcataaattctatactgtttagagcttaaagctacagaagcattgttaggaattgcttggacactgaattttaaactttttgacattgttaacaagcatgttcatcttttcttgtcactagtccaagaaaaatatgcttaatgtatattacaaaggctttgtatatgttaacctgttttaatgccaaaagtttgctttgtccacaatttccttaagacctcttcagaaagggatttgtttgccttaatgaatactgttgggaaaaaacacagtataatgagtgaaaagggcagaagcaagaaatttctacatcttagcgactccaagaagaatgagtatccacatttagatggcacattatgaggactttaatctttccttaaacacaataatgttttcttttttcttttattcacatgatttctaagtatatttttcatgcaggacagtttttcaaccttgatgtacagtgactgtgtaaaatttttctttcagtggcaacctctataatctttaaaatatggtgagcatcttgtctgttttgaaggggatatgacaataaatctatcagatgggaaatcctgttacaaagtagaaaagctttagtaatttactcagtgtggtggttttatcctttttttctttttctcccttggtctataatgaaattgttacagcagtgcaaaataaaatcctatgtataaaagtgttctttttttttattatgaccacctcttttttaatgtatttttagtccacttacagcttttacatgggtttaagcatgttttttaaaagggtcagaatggttaacactcaaccctttttaaaaattttgctaaaatgcgacaaatctcaccatactgaaattatttttgttgatggtgtaagcagtgtaagcaagtgttttctcctgaactagcacaaaagcacttatgcctgaaagaaagcataaagaagttctaactctgaaactaactactttcatttcgctcatggccttcaactttctacaggtcttccctgaagattcagcagtactttctcaaaggtttgacagtactcttgtgggaaatcaccaaatgctgtcatagttttgttttaactgtctccttgagggcagagggaagggtgagagaaaatctgttttcatgggtatttgtagtacagcctttttttctttcaagtggctgtatcaaattcactggtcttactaatcactgtctttaccagtgagtacaaaaagttaaggcaactaggacaggtactgctgtataccaagaagagaatgattctttggaaattgttatttttaagcttctgttaatttttccagaagtttagtgcgtttcttttccatactttctcccctaattcttttatttgaagaagagaacttaatggcaaataaacaacaaaccaggacatgcattttaataccctaaggaaaaatggaaccctcaaatataactcctcccacaaccaccctaatgtgcctcagtctggggcagcaggtggacttctcaatagttcttttccacattctctacaaatcacatctaccattaaggaatatgttatgaatcctttctgttaattgagaaagcaatgttattgtctgtgatttccagtctttgctcattttattatccctgtcaaataatgtaatattggtacctgcagttgaatttgtaatattgtaattgaatttttagttgatcttcgatcagtttttatagcatctatggacatagaaaatcagtcactgaaaaaaataaacacagctttcaatgtctcaaaaaaaaaaaaaaaaaaa

SEQ ID NO: 1782 - DNA, 2073 bp, Homo sapiens
aagaaaattcgagggaaagaagtttacatgactatggcttacggcaagggagaccccctcctcccacccaggctgcagcacagtatgcattatgggcacgatcctccaatgcactactcacagacagctggcaatgttatgtctaatgaacattttcatcctcagcatccatctccgagacaaggtcggggatatgggatgcccaggaattcatctcggtttataaacaggcacaacatgccgggccctaaagttgatttttacccaggcccaggtaaaaggtgctgccagagctatgataacttctcttatagatctcgttcatttagacgtagtcaccgccagatgagttgtgtgaataaggagtcccagtatggatttaccccagggaatggacagatgcccaggggcttggaagaaactattactttttatgaagttgaagaaggggatgagactgcttatgcaacttttcctaatcatgaaggtccctctacaatggttcctgctacttcaggatactgtgttggaaggcggggacatagctcaggcaaacagactttgaatttagaggagggcaatggccagagtgaaaatgggcgatatcatgaagaatatctttatcgtgcagagccagactatgaaacttcaggtgtttatagcacaactgcatctacagcaaacttgtctcttcaggacagaaagtcatgttctatgtctcctcaggacacagttacctcatacaactacccccagaagatgatgggaaatattgcagcagttgcagcttcctgtgccaataatgttccagctccagtcttatctaacggtgcagcggctaatcaagctattagtaccacttcagtttcctcacagaatgctatacagcctctctttgtatctccacctacacacggcaggccagatacaaaagttttgcagtactatttcaatctaggattgcagtgctattaccacagctactggcactccatggtctatgtgccacagatgcagcagcagcttcatgtagagaattatccagtctatactgagccacctctggtagatcaaaccgttcctcaatgctacagtgaggtgaggagagaagatggcatacaggcggaagcatcagcaaatgatacttttccgaatgctgattcttcatctgtccctcatggagcagtctattatccagtaatgtcagatccctatgggcagccacctttgccaggttttgactcctgccttccggttgtgccagattattcctgtgttcccccctggcatccagttggtacagcatatggtggttcttctcaaattcatggtgctataaatcctgggccaattggctgtattgctccatctcccccagcttctcattatgtacctcagggtatgtaagatccagcagtatgaagtattcttgcactgccattttcttgctgtttttgtttttaaaaagtattttatgttagtggttaaatgatttaggtgattagtgtttactattgtatttgtctttaaaattattttatcttttgatttaaaatagtactttaaaattaaggggtattattttgggctgtgactaaggaaattgagatggatgtacaactagccccatattgagcatacttcattgtattcagctgttttcctgtcagccatttgtcagctttatattagctgatggtaccaattgataaaatgaatataaagtatttcattggttcaaaaatcacacatcatattaaaccatgcagaattggagtaacttccacttttttctagaaagtaaaaccaagagcctttgcttctggataactcacttaatattaaattaaagagctcttcacgtttcttgagaattatctgaagccagttgcattctgtgatatcagttttgaaggcacatggttctctgctttagatttatcccatatgctattgtttaatactggatgtatgtaagtgttttactgcactgtattgaattggtgtcttttgcacagttagcagtaaataaaaattagcatttaaaattgcaaaaaaaaaaaaaaaaaaaaa

SEQ ID NO: 1783 - DNA, 2046 bp, Homo sapiens
tctgtaattcatggctaatccgaagagtttgattgagttgatggcggcagggaccagatagacaccttggtgattgtctttggccataagaatagaccaaggataggttttccagagacaccttcatactgtaaacatggtttagacacggtcatagggaaggctgctggtccatcatttgttctgaacaaatggcatttcctgctcctgaccctggcagttggccccagattccttgtcgatgacttggaaacgtccattctgggtaaggtcagcactccctgagagatgttaacaaagtttacctatgagtcttactgtgtagacaatctgaagtcaattttagttacacaatcagcattcccatgtgtcctcagtgtcttatcaatgaactatgtgtatcaagccatactaaactggagtttagcaggacagaggcaaactaaatgtagaacataacatatcagctgaatatgtctatccaggactgtttttctagaacataaatcatggagctccttgacagtgtatccactgtttttggggtttaataaaaccaactagaatttagacttaaaagaaattattattccttttggttgtccacataaagtagtccagggctatcatatggctaaaatcaagttatttggttcatctctggtatgtatttataaagtcaacttatcagccattaagatggagatttgctttaaatttttgcagtgtgtgtggcagtcagaaaaacccatatctagttttcaacttcacctctggtgtttttatggcttaaccttatatcattgatccaacatctagcctgatgctggagctcttatttctagcctgatgctggagctcttatatctagcctgatgctggagctcttgaagctgactcttggaagtttggagggtgtagagtttcccatctagtatttaatttgtccctgtgccattagtcccagcttgaagtcatttgccagtgtcgatgttgacaggattgtgacaatattgcctttcataaaaccgagaaccaaagaattccattattctaacaaagcctgagtttcatagattgtgggcacatctagacagatatgtgcatgcttgatggtgcagagaaactgctgacttccaccaacctcatgctccccctggctggccatacagagggattcgttgtcatattgaaaaggctctgaaagatgagtttctaattgaagctcactatctcaggttggtgtttctactgtgcagtcccaagcctgtatccatatcataaaagtggaggcctggtactcctccaggttatctggccagtgtagactcctccacctgaatatgaacctccagggtaagaatttttcagacatgtctatactgaacagtaggatcctgcactttccaaatgtctgcctccttttgttcttcattgacccattctaattcctgttaggtgtgagaagaattgtcttcagttctctctccattctcattcatgatggaatcattgatccattgaccagttgagaaatgattgatgctgaagaggtggtattctgttggtaaggcttattaccaaacttccgataatgaagcaggctaccaaaaacttatccagcccaccctaggagtgtttggatttgatcatggatgtagcatacaccaaaatccaccgagacctttgcaaaattaggctacttgttttattttgccagattatcatgggagagtctttaactagttctgaatatttgtaagtctgagtacttcatagaattataaagaaggtacagctgaccccttctcaccatgttgtaaatatttactgagactgggtgcagtactgagggataataatcttctgatttatcaaatcctgactgtctagagcaaattgtacactctctttgtgaatggtcctgtaacgtgtatgaacacatttctgggtgccttagaagttgtatttttcatgtgtgctaatatgcagtatttatacattgtgagaagctgctttgaataaaaaggttgaaacttcgtctgc

SEQ ID NO: 1784 - DNA, 2875 bp, Homo sapiens
ggcacgagggtggtgttgggccggtgctgctgccgctgccgccggggaggaggtggaaagcggggctgtggcgggccggcgggggcggcctgtcagccgctgctttgtctccttagctcgggtcccttctgcgctgccgcagggaggccgcccgggccaggcgagccgaaccaatgctggacctggaggtagtgcccgaacgctctctggggaacgagcaatgggaattcacgctgggaatgcctctggctcaggcagtagccattcttcagaagcactgtcgcatcatcaaaaacgtccaggttctctacagtgaacagtctcctctaagccatgacctcattcttaacctgactcaggacgggatcaaactaatgtttgatgctttcaatcagagacttaaggtgatcgaagtatgtgatttgactaaagtaaagttaaaatattgtggcgtgcattttaattctcaggccatagctcctaccattgaacagattgaccagtcttttggcgcaacccatcctggagtgtacaactccgctgagcagctcttccatctcaacttcagaggactgtctttctcttttcagttagactcatggactgaggctccaaagtatgagcccaattttgcccatggcctggcttctctccagataccccatggagcaactgtaaaacgaatgtacatctacagtggcaacagcctgcaggataccaaggctcccatgatgcctctgagctgtttcctgggcaatgtctatgctgagagtgtagatgttcttcgagatggaactggacctgcaggtttacgacttcgcctacttgctgcaggttgtggacctggcctattagcagatgccaagatgcgggtatttgaacgttcagtgtattttggtgattcctgccaagatgttcttagcatgcttggctctccacacaaagtcttctataaatcagaagacaagatgaaaattcattctccttcccctcataaacaagttccatcgaagtgtaatgactacttttttaactacttcactcttggagtggacatcctctttgatgcgaatacacacaaagtgaagaagtttgttctacacaccaattaccctgggcattataatttcaacatttatcatcgctgtgagttcaagatcccactagccataaagaaagaaaacgcagatggtcagacagaaacatgcacgacctacagcaagtgggacaacatccaggagctcctgggccaccctgtggagaagcctgttgtcctgcacaggtcttcctccccaaacaacaccaacccatttggttccacattctgctttggtcttcagcgaatgatctttgaggtcatgcagaacaaccacattgcctcggtgaccctgtatggcccccccaggcctggtagccacctgagaacagcggaactcccctagggacaccaccacccatgcccctctgtcccgtggaactgtgcatcacatcctgctcagtgggcctctgtaccaccctgtgggttttcttggacacctggccagtgctgaagggctgttgtgatgttctgaggttgggctcaggctgggtgctctgccatgggctgagtggcccagatattcttctgtccatctttggcctgctggtgccagcaggggacacagactgcaaagagaagcacaaagtttgagccttgattcctggacccaggagctctcaactaacaaggaggcaggagaggtcaacccttgtcccatgcacattgggaagacttggggctctttctgtgactgaggacacaggcacccaggataaggacaaggtcctgcctttggctccacattgccacatgacccttaaggcaagcaggtagcgtgtccatagtacttggttgcgacatttgcactacatccactttagttacttgatgagctggctgtggccagggtggcccacctgcccttccctgttcctttcttgcacgcgctccctgcctgggcacaccaaactggttgaaacacagctttctaccatccaggtacatgcccaggcctggttctcacccctgttggagtcagctttcaagattgcctgtgcccctgctctgccccatcctggctggcagggctgcatgtttccatcctgtttgcctcttttatttaatgccaaagttttagccaaagacatcttcctacttttgttgtgtttcagcattctgttctgcactgtgggctggctctctgccccaaccctgggcactggcccctggctgggccatttcatggctcaaagcctctgggggctcaaggaaggctgggctgctcagtcccttcatgggtcttgctaatggaaagtagcatatatgtgctttaaaaatattaatccttttgaaaagaactgagaagaaaaatgtataattttatcccatttttaatattttggtctagcaacttgtgatacatagatgacaattttgtgagtttttcaaatgtgtgtacagatttttgtaaatatgactcttttgtaattaactcatgtacagcctcatcctgtatagtttaatgatgaatgtgcaggggacctgtctcaggctcctatatggttcctgggccttatagccaggtttgtgtggcgctcccgacttttgtgactgactggtgtcttcccatttggactgtggcctggccagagccccttgcatatccccactgtcaggggcagccaggactgttcccatcctcctggaatgggggaaccttccttatcccctgcccacatcccctctccaataaagcacctgtgccctcagcaatggcctgccatgtgctgttgctgggatgtttgtattaaaaaaaaaaaaaaaaaaaaaaaaaaa

SEQ ID NO: 1785 - DNA, 5289 bp, Homo sapiens
ccagccccttccgtccgccgcgctccgccgctgtcctccgccggcccgcgtgggaggacgatgggtcagcgcggaaaaagtgaatgagggcggcagcggtggcggcggtagccagcgcctgactcggcgggcccggagcaccgcccgcgtcccggcccccggcaccatggacgcgccgcgcgcctcggcggccaagcccccgaccgggaggaagatgaaggctcgtgctcccccacctcctggaaaggctgccactctgcatgtgcacagtgaccagaagcccccccacgatggggccctcgggtcgcagcagaacttggttcgcatgaaggaggcgctgagggccagcaccatggacgtcaccgtggtcctgcctagcgggctggagaagaggagcgtgctcaatgggagccatgcgatgatggacctactggttgaactttgccttcagaaccacctgaatccatcccaccatgcccttgaaattcggtcttcagaaacccaacaacctttgagttttaagccaaatactttgattgggaccctgaatgtgcatactgtgtttctgaaagaaaaagttcctgaagagaaggttaagcctggtccccctaaggtgcctgagaaatctgtgcgtttggtcgtgaattacctgcggacacaaaaagctgttgtgcgtgtgagccctgaggttcctctccagaatattctcccagtcatttgtgcaaagtgtgaggtcagcccagagcacgtggttctcctcagggacaacattgccggagaggagctggagctgtccaagtccctgaacgagctcgggataaaggagctctacgcgtgggacaacagaagagaaacctttaggaaatcatcacttggcaatgatgagacagataaagagaagaaaaaatttctgggatttttcaaagttaataaaagaagcaatagtaagggctgtttaacgacccccaactccccatccatgcactcacgttctcttacgctgggtccatccctctcgctgggcagcatctcaggggtgtccgtgaagtcggagatgaagaagcgccgagcccctcctcctccaggttcagggccacctgtgcaagacaaggcatcggaaaaggtatctcttgggtcacagattgatttacagaagaagaagcggcgagcgccagctccccctccaccacagccaccaccaccgagtcccctgatccccaaccgcactgaggataaggaggagaacaggaagagcacgatggtaagcctgcccctggggtctggcagccactgcagcccggatggagccccgcaggtgctgtcagaggcggaggagaccgtgtcagttggcagctgttttgcgtcggaggacacgaccgaggactcaggagtgatgagttccccctcagacatcgtctctctggactcgcagcaggacagcatgaaatacaaagacaagtgggccacagaccaggaagactgcagtgaccaggacctcgctggaaccccagacctgggtccccagaagagccccttgtgggagaagaatggctctgagaactcacatctgagaactgaaaaagctgtcacagcctcaaatgatgaagaagacctattaattgctggagagttccgtaaaacccttgcagaacttgatgaagacctggaagaaatggaagacagctatgaaacagacaccagctccctcaccagctccatccatggtgcatccaaccactgcccacaggatgccatgatccctcacggcgacacagatgcaatcccagtaacattcataggggaagtttcagatgatcctgtggattcggggttgttttccaatagaaacaacaatgctgggtctttcgactcggagggtgttgccagcaggagagactccctggcgccacttcaagctgagcacagccagccccatgaaaaggcaagggaggaagtacctgccctgcaccccgcttcccatgacgtcggaaaaggaatccgtgtggccttatctaacatctctaaagatgggaatctaatggaaacggcgcccagggtgacttcttttgcttcgaatcttcacacagacaacctaaatgcaaaagtgaaagacaaagtgtatggctgtgctgacggggagaggactcaagccacagagagagtgaattcccaaccggtgaatgaaaaggacagcaacgataaaaacgctgccttggcaccaacatcatggcaccaacgaggccaaaacccagggaaaagctacagacttaagcacggcctcacaacgtataaaatcattcctccaaagtcagagatgcgatgttacgacagagatgtgtccctctccaccggagccattaagattgacgagctggggaacttggtgagtcctcacgccaccggcatcaggatcatttccctgtcttcgtctgtgcctgaagcagaatctcagcccattgggaaagtcagagagttctggaggtgcaactctgtggaaaaacacctgggccgaccctcagagagctctgccaggggacccccctccacccctgtgcccacgcagacgcagaatccagagagcagactccaagcagaccccaagccaatatcgccccagcagaagtctgcccaccatgagggccggaaccccctaggggaggggagaaaccagccccccaccatgggcatgggtcacgtgagggtgccagcagctcacaccacagaagtcacatttctcaagcctcagagaagaacgtccagccagtatgtggcctctgccattgccaagcgcataggagccccaaaagtccatgctgatgtggtgaggccacacggttatgccgagaagggttatgcaggcaaggcgccagtgctggctgcaccacctgtcactgtgaaagatgacaggacatccagcccacactcagagacacaaggatggaaggatggtgcccagtggccctgtgtcactcctcccaacaaccacggggaagatttggcagtgggagcccctcctaggggggaggtcattggcccacacaggaagttgtctactcaggacagacctgctgctatccacagaagctcctgtttctcactggttcagtcttcccagagggatcgtgtttctgtgggacagagctgtggtttcagtggaaagcaaagcacaagtagccaggaggccagctcagcatctgagcccagacgcgcacctgatggtacagacccaccccctccacacacatctgacactcaggcctgcagcagggagctggtcaatggctctgtgcgcgccccaggccacggcgagccttcccaccctccaggagggtctggcacagaaagccacattctcctagaaagagaggaaaagcccagtgtgttctctacagatggaaatgaaacagacagtatttggccacccagcatttttgggccgaagaaaaaattcaaacctgttgtccagagaccagtcccaaaagacacatccctgcactctgccctgatggaagccatccactctgcgggagggaaggacagactacgcaagacggcagaacacaccggggagggcaggccagcgaaactgtcctacacggaggcagagggcgaacgatctgcactgctggcagctatccgcgggcacagcggcacctgcagcctgaggaaggtggcatcctctgcttctgaggagctccagagcttccgagatgccgcactctctgctcagggctcggaaagtcctctgctagaagaccttggtcttctgtccccaccagccattcccccaccaccccctccaccctcccaggctctctctgcaccaaggacggcctccaggttcagcacgggcaccctcagcaacaccgcagacgcaaggcaagccttgatggacgccatccgctccggcacaggggctgcgagactgagaaaggtgcccttgctcgtgtgaatgaacagaggccagagaattgcagaaacccacctgtaatatgcccacaggcgtcactcaaggagtctgcatagccaggaacatcaagttttggtgttactttcttgtctacaggccaaatgcgcacagttgattttcggtgtgttcctgtataacggcttgaaaggaaaggagaagatgctgtgtcgctgcgcagctcgtgtgccaaggaaatgtgttttgcctctgaatatcttaagttgctaataaacgattcttgttggcaggttaatgggactataaatgctggagcccagcactcacacttaattatatttatgggcaaagtaaaaagaatcatgccttagactgattttggacctttgagacttttaccacatacagatggatgaaactacttactgatttaagatcttttgaattttagaaaaaacatatgaatcagatggaacaatctgaatgtgatatgctccatgatgctgtgtgttttggtagtaagaaaaaaaattgggaggcttttcaaaggtggctttgttaggtagtaaaactgctggattcttcttcctcaaatatttggggctaacacttcacagagggtcacagtccatgatctgaccaactaagcttttaaaaatcaactattaccacccagaaaacagtcctacgtgatcatgtggccagggcatgcccgagtcctgcaagggtggcgggtggctgaggtcacaccaccactggagtggatgggcagtgccccacatggacagccattccccaggctatgaagtgacataggcctcccccacggtgcctgtgtacggagcctgatgacttcactgggagccttctggaatcctgcagagggtcaaggagcagggatgttggatgcccacctgtcaagagttcagatcaaagttgcgctgagagcatcacaattttggttcagccttgacgcgtttgtccaacagctcattggctccctttgtatgatatcgtggtcttctcacatggtgcccagtcaccaatatttataatgaggtctaactacagcagtagtttttcatatatatctctaaaacattttgttatattgaaaaaagtaatagaaatcaagatgtgttgatgaaataaaatgtgtatctgagtgagaaaacaagtatggtgaggtcactttaatgtttcacagcgatctcagatctaggcctcaggtagaatggaagctgttctgcattcactgattaacgttgctaaactcttggtgaggcacgagctaccagccaattgctcttcatcacagctatctgtcttttagtgccacaaataaaagaaaatcaaatctt

SEQ ID NO: 1786 - DNA, 2854 bp, Homo sapiens
gacgggccacaccctctgagaaccttgtaccctcatctgctcgtgtggataagccccccagtgtgctgccctacttcaatcgtcctccttcggcccttcccctgatgggtctgcccccaccaccaattccacccccaccacctctctcctcaagctttggggtccctcctcctcctcctggtatccactaccagcatctcatgcccccacctcctcgattacctcctcatcttgctgtacctccccctggggccatcccacctgcccttcacctcaatccagccttcttccccccaccaaacgctacagtggggcctccaccagatacttacatgaaggcctctgccccctataaccaccatggcagccgagattcgggccctccaccctctacagtgagtgaagccgaatttgaagatatcatgaagcgaaacagagcaatttccagcagtgccatttccaaagcagtatctggagccagtgcaggggattacagtgacgcaattgagacgttgctcacagccattgcggttatcaaacagtcccgggttgccaatgatgatcgttgccgtgtcctcatctcctctcttaaggactgtcttcatggcattgaagccaagtcctacagtgtgggtgccagtgggagctcttccaggaaaagacatcgctcccgggaaaggtcacctagccggtcccgggagagcagcaggaggcaccgggatctgcttcataatgaagatcggcatgatgattatttccaagaaaggaaccgggagcatgagagacaccgggatagagaacgggaccggcaccactgagaaaggagtctggttggaagcaaatgtttttttaatggacttgcatctcctcaccttgatcaggactaaaggacggaggccgccccacccccttccctttcctccaaacccctaactccctccagacacccagggaataccctctgccccacaggattgaagactgcttggcagtcctcccaatcccacacctcctgtttgccaggggaaagaacctaaagacttcgtgtgattgggaggggtggcagacaggaagaaaacatgtccaggcccctggtctccatagagaatggtgctttgtccaagaaaacgtatgagtttctgattctccgggagccgttcaatggtgaggttgatgggaagacttccttcccaaagaaaatagatcctccatgcaggatctaggagagtgactgggtgtgccaaaatatgcccagggtcctgccctcagcactagatttaatggggccaagagggtccaaaccccttgctaacataccacttctttgtttaactcctttacctttccagccctttgaggagggaccatgagaacagaaattaccttatgaaaagctacttctgttcctgctttccctctcacgtattgacggtttatttctttgacctcccagagggctgaactctttcaactctgcgctgcccagccttctcagtggacttgcccctcctaagcagagaaggcctatgaggttgcttgctgctgggaagcctggcagagccaattaccaccctctgctgcttagtgcttgggtacctcttgcaataaccagctcttagttgttccctttccctggggcttttccatttaacacatggagcccttcccccagaaggctacttccttgttttagaggaaggtactgcccattgggagatggggacattgggacctcagcaatgaagaacccttgtgaagtaaccaggaggaatgaggaaagaagcaagttgggcaggatatggcctacttccataggcttttcttttttcaggtttgatgtaagcatgggcttacatcccccaggtacatacttttacttattgtgggataacctggcactagtaggcaggtaaagtcacaaatttggtgtcttttcaccttttgactgttgacttaatagctcctctcactctgcctggagatacttcctgcctcagatgaggagccagaagaaacagagcccgacttgaatgaactcagctcagagttctaaggaccagcattctgggggccattttctctacaggcaaatggaattgcttttccataacatccaaattgtaatgtggttgctgctgaaggaggaggcagcagcgaggtcctgcggtacccatggggtgatgctacttctgcatgcatctacagggcatctgacacctaacatgagacgtggcatgtgagatgagacttggcatgtgagacatagggtcactagagacccttctgggtcagaggagagagactgaattggactaaacccgtcctctgttcccagcacgtttctcatatagccctcagtcactgagggagtcccccgcaggattggagaggcacattcccttgggacagaggctacaggttggagctttttttcccctgtcccccaaccccatccccacctccacttcagaacatggcaccccacccaactggccaagtgttaagtgatgtgcttattgagagcaactccgggtgtcttttaaaatgtagagaaaaggtgacagtttaaggaaaaatatatatagaataccagaaatgccgtttacccggagaatttttttctccccatttgttttgtttttactcaatgacaccatttttagttttatttcctgatagcaaaaggaaaaaaaacacccatccctcaaaaaggccaaggtcccgtccccctgttgtcggtgatttgtttgtctttctgataggttgaaaattgtgtaataaacttgatgacgctgtcaatcttttatactgcattgtatttttttccttttgtaacaaaatatttttaaataat

SEQ ID NO: 1787 - DNA, 5422 bp, Homo sapiens
ggacgactaaccagagacaagaaatttcaaaggtacctggcacgagttaccgacattgaagctacagacaccaataaccccaatgtgaactatgggatcgtggtggactgtggtagcagtgggtctcgagtatttgtttactgctggccaaggcataatggcaatccacatgatctgttggatatcaggcaaatgagggataaaaaccgaaagccagtggtcatgaagataaaaccgggcatttcagaatttgctacctctccagagaaagtcagtgattacatttctccacttttgaactttgctgcagagcatgtgccacgggcaaaacacaaagagacacctctctacattctctgcacggctggaatgagaatcctccccgaaagccagcagaaagctattctggaagaccttctgaccgatatccccgtgcactttgactttctgttttctgactctcatgcagaagtaatttctgggaaacaagaaggtgtgtatgcttggattggcattaattttgtccttggacgatttgagcatattgaagatgatgatgaggccgttgtggaagttaacattcctggaagtgaaagcagcgaagccattgtccgtaaaaggacagcgggcattctcgacatgggcggcgtgtcgactcagatagcgtacgaagtccccaaaactgaagaagtagctaaaaacttgttagctgaatttaacttgggatgtgatgttcaccaaactgagcatgtgtatcgagtctatgtggccacgtttcttgggtttggtggcaatgctgctcgacagagatacgaagacagaatatttgccaacaccattcaaaagaacaggctcctgggtaaacagactggtctgactcctgatatgccgtacttggacccctgcctacccctagacattaaagatgaaatccagcaaaatggacaaaccatatacctacgagggactggagactttgacctgtgtcgagagactatccagcctttcatgaataaaacaaacgagacccagacttccctcaatggggtctaccagcccccaattcacttccagaacagtgaattctatggcttctccgaattctactactgcaccgaggatgtgttacgaatggggggagactacaatgctgctaaatttactaaagctgcaaaggattactgtgcaacaaagtggtccattttgcgggaacgctttgaccgaggactgtacgcctctcatgctgacctccacaggcttaagtatcagtgcttcaaatcggcctggatgtttgaggtgtttcataggggcttttcgtttcctgtcaactataaaagcttaaagactgccttgcaagtttacgacaaggaggttcagtggacccttggagccatcctctacaggacccgctttctaccattaagagacatccagcaggaggccttccgagccagtcacacccactggcggggcgtttcctttgtctacaaccactacctgttctctggctgcttcctggtggtgctgctggccatcctgctgtacctgctgcggctgcggcgcatccacaggcgcactccccggagcagctcggccgccgccctctggatggaggagggccttcccgcccagaatgccccagggaccttgtgatccagctcacagctccacgaagactcaaaaggaaaagccatttttgcctcagggtttctcctctttattttcctgtggttttgttttttctttcccttttttgttcctccaaacaaaaacaaaatgcaggccgagcgcggtggctcacgcctgtaatcccagcactttgggaggccgaggcgggcggatcatgaggtcaggagatcgagaccatcctggctaacacggtgaaaccccgtctctactaaaaatacaaaaaattagctgggtgtggtggcgggcgcctgtagtcccagctactcaggaggctgaggcaggagaatggcatgaacctgggaggcagagcttgcagtgagccgagatcacaccactgcactccagcctgggcgacagagtgagactccgtctcaaaaaaaaaaaaaaaatgcattgtttataagccctgctgtctagaagtattgcgtttagccattttgagtacagcattaaattgaggagtggggaagagggaaattcacttgatttttgctgcacaggatatctgccaaaaataaatgagatttctggggtttctctaaggaatgttaaatttaaacacatgcactttgatactggagggaggtggaaagatgcattctgtcagtggagaggggactgaatagtgatgctttcatagaaccaaaaaacttactgcctgaaatgataatcctcttttttctctatcttgaaagctctaacctgaagagggtgattttttttttttatttattgttcaggtctgttactgtatatgttttctttgcaaatttaaattttttaaaccatttatatccaaaacagagaaacatgggcaccaggagataaccatttataaaagtgatagtgaactatcgactacagctttgtgtgagtgtgtgaaaaatcccaagaaaccagcgtgaggggaggcaatgctggttctttaaaaacacacacttcagaatttactggtacattttatttagaaaaatcctcgttactgttatcttttcctgaccgcaggtaattacgctccttattccatatttcagtggcattagaacactgtggttttgaaagaattggaaattcctagtttcaccagtttcggttttattggaactagagcacatgcccacttcttgctcagtattcctcagtgtttctgcttaatcgtgcctcagtttcttccagcttccaattggtgtttcccccaccccccttaattaaaagtcatctcagcttttaatcgtactgggagaccccatgcacagcctgccgagtcctcttcctaaccgcattgactgaggctgttgctggcagcaccactgtaaatccagaagggaagagtctgcatccaatacaggaaataaattcacattttgaaggaaaaaattcgacaatttaagccaaaatctaaaaaggacaattggattggcatatgtgagattggtgttttttcacctatttatttagttgagaagtttggggaattctcgtacagtttttttaggtggagtttgttttgtgtgagtgtctgtgtgtgctgttccctaactccagaacagttaaattcctgtagttggtagcagattagtacccagaagtggggttgttgctataacagataactgaggatattataaaagtggctttggaactaggtactgggcagaggctgggagagtttggagaaacaggagagaaaaggcctgtattgccatgaactgagcattaggggcagttctgctgagggatcagaagagaagaccaagggaattctgtcccagttgtggctcaaactgcctcaggtgcagcttaacctgcgtctctggaaggtaaaatgcatctgatccttgaggcaagagctgtgggggcatggctccctcacctggatttcaaagcgtgttaccagcagcctggggacccaggctctgcctctggatttacctgcatcgtatttgcgcttcgtggtcaaagttgttaagaaaggggtgagcttctggctacctaataagttggtcttggccacctgcctgcgacacttcctggaggagccatggattattggtggaggctgcagggagctggcgatggagccactggtgtcagcagcagagagggaagaaaggaaaggaaggggccacaaatggttgaagtgggcaggtgggcacccagggagttaggggaccccgccttccagctctgggcatagaagagttagtcacatacctgaggatcctgaaacaagggctgagaaaacctcattgctccagctgagaggtagtagtggatttgccatttttaaacagttgcctaagaaaaaaacgttgaagaatatgcagcagacactatatgtggcctgtaaagcctagaatatttactaaaatatttacagaaaaagtttgctggtccttgtgagaacaatgcagttcaaaaaaggatacagacagaagcatcctcttaaatcaggaatgtagtttccatttgtgggcacgaaaagatggacaagagaagtaaccaaacttcaatcttaaaatatttgttgcaccagaatttcacttcggatttttccgtctagattattttcaagatgagttttgaaacaaaccaagaaacctgcccctcacccaaaattgtttaaaaagagaccactcaagggagttcattatgccgtatggagatgtctgcagtcgcagcaaatcacattccagagaaggtctcgcgtaggtgaagacagccaggtgctttctctaagagatacagggtgggtgagagacaagccagggaggatcttaattcaagagaagaattcataccaagagctgaccaagaaggcagtaaattctgtgtacttgtagcagaagaaattggactaggaacttgcccaaagctttatcaaagaaaagcattgtgttcaatcttggtagaaacatgccagcaataagtgcttatgttccatagccatatcatgggcttctcacttttaaacctcctccaggggatgttctcagacatttcacaatccctctggggacattacagtagaagagaaacacatggaactgtaccagtgctttttgcccatgttcatcctaagctccggctttaggcagtgctttctgacctgggcggagtgaagacgctgctggtggctgaggccagtaacatggggcccctgcccagccaccctgaaggctgggtaggtccctcttttcaccaccagttttccacacctgtgtactctagattaacaaactctggataaacagatatttacattttaaactcaggcctacacagagtagttttccttataaggagcatgtatcacttagcaagaaactaaaaatggcaaatgagtttttcatcctttaagaaaaaaatcagctttagaattctctgcggtcagttgtgtgcaatgcaacaaaactacctttcagtaaattacttagttatttatttcagtgttttgtttcttttgatactaagtttccctttcaataatgaatgatgtgaccaaccaaggagaatttgtttgttctgtactaaaattatattttacagttaggaattataaaaagcaagggagcatctttaaatgttttttgtttaagcgatgtcttccatccaaagtaagaataatactctcggaaggtccttttggtgtcatgtcacttgctgtatgtggcagccttacagtgccacacttgggtactgaaaaatcaataaaacgaaagttcatcatccc

SEQ ID NO: 1788 - DNA, 2620 bp, Homo sapiens
caactctattgcgcagctcgctgccgtgcgtttaacccaggcgaggaggaggaggagaaaattcccccagattcgggcaggcccgcaccccacattccgtcctgttttgagaggaggagggaagagaaataaacgtggcagcgcatagaaggccagcagggagactgctttccagacacctccggcccacacagccgttcaccccccgtcttttcagtcctggaaaaggaattcggtctgtccttaggatgaagctctaactgaactgaagtaaggagaaacagccttgaatctttggagggtctgtcttccttttgggctctgtgcaactgcagctacagtggaaaaaagcaaactgctcttgatcccaggccctgcctaagcctcagcagaacttgtaagcctaaactgaagagtctcacccggacgagcaggcatcccttaaccttaagcaatccagttccacgccctggatcagtgaataaccccagctgcaccatgagccgcgttcgggatgctggctgtgtagcggcggggatagtgataggggctggtgcctggtactgtgtctacaaatacaccagggggagagaccagaccaagaagagaatggccaagcccaaaaaccgggctgtggctgggactggagccagggctagagctgggctaagagccggattcacaatcgaccttgggtcaggattcagtcccccaaccccagtccgtgctgaagcagaggacagggcccaggatgaagcctctgctctggacacagttggagctgaggcagtggccccagctgcatccagcgctgaggctcagagtggggcaggcagtcaggcccaagaggcagatggagccggggttgggcctaaggccgaatcagtagttggggctgcaatggcttctgcaatagcaccacctcccggggtgacagaggcccttggggctgcagaagcccctgcaatggcaggggctcccaaagtggcagaagctcccagagaagcggagacttccagggcagcggtgcctcctgggacagtggtgcctaccgaagcggcagcacccactgaggtgaccgagggtcctggggtagcagcacctaccaaggtagctgaagctcccggggtggcatcgcctaccgaggcagctgaggctcctgtgcccgcaacgcctactggggctgcagcacctactggggctgcagagtctcctggaacttctggttcccctagaacagcggtggttcctggaacatcagctgccaagaaagcaacccctggggctcacactggggctataccgaaagccacatcagcgactggagcggtacccaaaggtggaggcaagggtgtaaccaggtcccggaatgggggcaagggcaagggcaagaaaagcaaagttgaagtagacgaactggggatgggcttccgtcctggagatggggctgcagcagctgctgcagcctctgctaatggcggacaggctttcctggcagaggtccctgattctgaggaaggggagtccgggtggactgacacagagtcagattcagactctgagcccgagacccagcgcagagggaggggaagaagacccgttgccatgcagaagcgcccctttccttatgaaattgatgagattctgggtgtccgcgatctcaggaaggtccttgccttgcttcagaaatctgatgatcctttcatccaacaggtagctttgctcactctgagcaacaatgccaattattcatgcaatcaagagacaatccgcaaattgggaggcctcccaattattgcaaacatgatcaacaaaactgatccacacattaaggaaaaagccttaatggccatgaataacctgagtgagaattatgaaaatcagggccggcttcaggtgtacatgaataaagtgatggatgatatcatggcctctaacctgaactcagcagttcaagtagttggactaaaatttctaacaaacatgactattactaatgactaccaacacctgcttgtcaattccattgcaaactttttccgtttgctatctcagggaggtggaaaaatcaaggttgagattttgaaaatcctttcgaattttgctgaaaatccagatatgttgaagaaacttctcagtacccaagtgccagcatcatttagttccctctataattcttacgtggaatcagaaatccttattaatgcccttactctatttgagattatctatgacaatctcagagcagaagtgtttaactatagagaattcaataaaggttcccttttttacttatgcactacatctggagtgtgtgttaagaaaattagagccttagcaaatcaccatgacctcttagtgaaagtgaaagttataaaactagtgaacaaattctgattggttatgtaccgtcaaaagacttgaagaaatttcatgattttgcagtgtggaagcgttgaaaattgaaagttactgcttttccacttgctcatatagtaaagggatcctttcagctgccagtgttgaataatgtatcatccagagtgatgttatctgtgacagtcaccagctttaagctgaaccattttatgaataccaaataaatagacctcttgtactg

SEQ ID NO: 1789 - DNA, 2241 bp, Homo sapiens
tgggacttatagaagggagaggagcgaacatggcagcgcgttggcggttttggtgtgtctctgtgaccatggtggtggcgctgctcatcgtttgcgacgttccctcagcctctgcccaaagaaagaaggagatggtgttatcagaaaaggttagtcagctgatggaatggactaacaaaagacctgtaataagaatgaatggagacaagttccgtcgccttgtgaaagccccaccgagaaattactccgttatcgtcatgttcactgctctccaactgcatagacagtgtgtcgtttgcaagcaagctgatgaagaattccagatcctggcaaactcctggcgatactccagtgcattcaccaacaggatattttttgccatggtggattttgatgaaggctctgatgtatttcagatgctaaacatgaattcagctccaactttcatcaactttcctgcaaaagggaaacccaaacggggtgatacatatgagttacaggtgcggggtttttcagctgagcagattgcccggtggatcgccgacagaactgatgtcaatattagagtgattagacccccaaattatgctggtccccttatgttgggattgcttttggctgttattggtggacttgtgtatcttcgaagaagtaatatggaatttctctttaataaaactggatgggcttttgcagctttgtgttttgtgcttgctatgacatctggtcaaatgtggaaccatataagaggaccaccatatgcccataagaatccccacacgggacatgtgaattatatccatggaagcagtcaagcccagtttgtagctgaaacacacattgttcttctgtttaatggtggagttaccttaggaatggtgcttttgtgtgaagctgctacctctgacatggatattggaaagcgaaagataatgtgtgtggctggtattggacttgttgtattattcttcagttggatgctctctatttttagatctaaatatcatggctacccatacagctttctgatgagttaaaaaggtcccagagatatatagacactggagtactggaaattgaaaaacgaaaatcgtgtgtgtttgaaaagaagaatgcaacttgtatattctgtattacctctttttttcaagtgatttaaatagttaatcatttaaccaaagaagatgtgtagtgccttaacaagcaatcctctgtcaaaatctgaggtatttgaaaataattatcctcttaaccttctcttcccagtgaactttatggaacatttaatttagtacaattaagtatattataaaaattgtaaaactactactttgttttagttagaacaaagctcaaaactactttagttaacttggtcatctgatcttatattgccttatccaaagatggggaaagtaagtcctgaccaggtgttcccacatatgcctgttacagataactacattaggaattcattcttagcttcttcatctttgtgtggatgtgtatactttacgcatctttccttttgagtagagaaattatgtgtgtcatgtggtcttctgaaaatggaacaccattcttcagagcacacgtctagccctcagcaagacagttgtttctcctcctccttgcatatttcctactgcgctccagcctgagtgatagagtgagactctgtctcaaaaaaaaagtatctctaaatacaggattataatttctgcttgagtatggtgttaactaccttgtatttagaaagatttcagattcattccatctccttagttttcttttaaggtgacccatctgtgataaaaatatagcttagtgctaaaatcagtgtaacttatacatggcctaaaatgtttctacaaattagagtttgtcacttattccatttgtacctaagagaaaaataggctcagttagaaaaggactccctggccaggcgcagtgacttacgcctgtaatctcagcactttgggaggccaaggcaggcagatcacgaggtcaggagttcgagaccatcctggccaacatggtgaaaccccgtctctactaaaaatataaaaattagctgggtgtggtggcaggagcctgtaatcccagctgcacaggaggctgaggcacgagaatcacttgaactcaggagatggaggtttcagtgagccgagatcacgccactgcactccagcctggcaacagagcgagactccatctcaaaaaaaaaaaaaaaaaaaa

SEQ ID NO: 1790 - DNA, 2274 bp, Homo sapiens
cggacgcgtgggcaagtaattagaagtaatccttcatttaacatccccactgggtgcctcgaggtatttcctgaagccgaatggtcccagggtgttcagggaaccttacgaattaagaaatacttgactgtggagcaaataatgacctgtgtggcagacacgtgcaggcgcttctttgataggggctattctccaaaggatgttgctgtgcttgtcagcaccgcaaaagaagtggagcactataagtatgagctcttgaaagcaatgaggaagaaaagggtggtgcagctcagtgatgcatgtgatatgttgggtgatcacattgtgttggacagtgttcggcgattctcaggcctggaaaggagcatagtgtttgggatccatccaaggacagctgacccagctatcttacccaatgttctgatctgtctggcttccagggcaaaacaacacctgtatatttttccgtggggtggccattaggaagaactccaaatcaaaatgctatgtaaatgtctatgggtgacagtctgctgatggtagaaacctttctttttagttcacaagtcagagatttggacggagctgacacaaagagtttggagctcccccatttctggctctcctttcaggggttccttccccaacccttttcagcagcggtggctgccccccattctgacccctgactcttccagccagaaagatggtggttttctaaaggaactttagctgtcctgcacaatgccgatctgtgtcttgcattttgggtaaaagccataaaaataagaaactcagcctgtggcctttctttcttccaaggctgggcttctttttttaagtgacttcatgcagtttgttgcttttaaaaatttgtccagaatcgttttctgcagaagcatggtctgttaggagcttactggccgtagcagaagcaattgtttcctgaattcttgacatttatctttgctgtattcatttagggcttgggagagtccgaagataattcagtcactgtcagattaataattttgtcaggacaaagaataccgttatgattatttaatcctttaaaattgtggtctccagagcttgttctcagaatggcccagaccaagccttaattgtgatagtgaatattaatggtcactttaaggagaaattataggccaagatgaaatgaacataaacctgtttgccctggctttcagtggaagatgatattagagaccaaaatctggttctgaaggtgtgtatcagccctaaggtgaaccagacttgggaaagattgtctttaaaaatcaatgagtttatgttttaacttctcagcttagttctatgcattgctctataacacacctagttaagttttatgttattcttgaactgtgattttttttctatttactttcatggtttggtgggccattgttatggactgaatgtttgtgtcccacccttcacccccaaattcccgtgttgaagccccaacctgcactgtggagctggggctgctaaggaagtaattaaggttacatgaagtcatggtggggctctgatctgctaaggttggtgtccttatagggagagaccccagagagcttgttccctccctccctgtgcatgcaaacaagagggcatgggagcacacagagagatggcagccacctacaagccaagaggagaagcctcacaatcaaactctcgctgctggcgagagtcttggactctgtcttggacttccagcctccagactgtgagaaacaaatttctgttgtttcagcttctcagtctctggtgttttgttattgcagcctgagaacacagctgtacgattatttgtcaaacagaaaacactgatacttaacaatgctaatgcaattatttatttgcttttcagtctctacaaaacgttctaaaacactaatctaaatattaacagtaaaatatttgcataactaatggaaactaagaaatcatatgaccaatatttcacttattggtaatcttactctactgatttccccccagactgtgatttttgaacttccttgcctttctcctgtctttctgtgtttattcatggaattccagttatctgggcttgaaattgcaggctctcctaacttaagcaaaatctgacagatcagcaaaatgagataaatgtttcttttttctttctgactgcattaaatcagatacaactcagcattaaaaagctatctttgtaaatgttgttactaataaattagtcttataaaaaaaaaaaaaaaa

SEQ ID NO: 1791 - DNA, 2382 bp, Homo sapiens
ctaaggacatattttgataaagtattatttgtaatgaacacaagcctctcttgagtagaagtctaaatcacattatgattattttatactagttctgctatcatgctgttttatgctaattctgcttattttagagtatttttcattaaaaggtgagcaaagtgaaagatacttggtattttacccagatttctaagtggcaacatttttattcttcagagtcaggtaaatgactataatagtttggtttctaatgaaaagtcaatagcattagcagttataattctgtttataatttcctttcagcatttacagtgaaaagtgagaattttaaaatttatgaaatctatattccaggtattgtttttagtctgaaaaacaaactcccccatgtggtattaatataccttcaatttatgttgagtcttaaacataattaggagatatttttctctatttgctagatttgttttgagtcaaaactgatttagtgttcttccaaacaacatttatgtgttggcctacagagtttatttcatgtgttttttttaatatttaatattatattacattcattgaaatctgttcaaaaacagattaagacaaacatttatgatggtctgtatcaatcagcagattttattgcttttcattattttactgtaaaggcaaagaatgcaataggtgatggttggttgaaaggaattgttattgctgtttttattttttactttttttgagacagagtctcactctgttgcccagcctggagtgcagtgtgtcatcttggctcactgcaacctccgcctcctgggttcaagggattctcctgcctcagcctccaactagctgggattacaggcacaagccaccatgcctggctaaaattcttttgtatttttactacagacggagtttccccatgttggccgggctagtctcgaactcctgacctcaggtgatccaccagcctcggcctcccaaagttctgggattaaatgcgtgagccaccatgcccggccgctattgctctttttaacttcatttgatgccttgcttataatatcatatgcttgaggctcactgttgatgtagagtagggcaaatctgtgtgtgtatgtcattaaaaaaattctaccatctttctttatcatctggtgtgggcgcactctacagtgacttcagtctgctcagaacgaatgtggaggccggccgaaactgatgctgcccacagtcccagtgaagttaggtgggttaattactgccattcctttctaagtgtgttttatggcatcctgcccacaaagaactcacagtctgattaggatgaacttaatgactatttacacctcaaaatatattcagcaaagggttcacttagttgcccctcatgcttcacaggttgactagtatctgtgggtacctccctgcccaggttattcactcacaagccaccgggccttcaggacatctcaagattcagtcttgacaatataatagcaaaagctggactaaagcccaaatggattgtctgtggcaatgcagaagctgatagcattaacagcagggtgttacagcataattgttaattcgcacatctattaggatccttaaatattcattacttaatgttaaattaacattctgtgtagggaggggaggcttattcaattcttctgacctcagaactggcagaaggtcagatgtgactacagaactctaggtgaaaaatcaggtagggttcaaattaagtagaactgcccttgccggaatagtgatcttcaaaaaacccttgcttttaggggagggaagcggggaaggaaaggaatgagggaggaaatattcctttctagcattcattttgcttagatcactccattgtgagtttgaccattttggagtcaaatgagcagacttccaaggagttgaccagtttgtgactagtctggtcacctttccagttacaggatcatattaactgtgtaaatgaattcatgggtagatgatttgtgcagatctgaatttaagaacatttcctttttctgtgggaatcacaagagtttatccactaaaaaaagatatgtaaaaaagatactttccagcacataaataaaggctggaattttacaacctgatgtatatattagacagttctaggatgttagttcccttcattccagagctatgcttgtgatacagccccttttcttataaagtcagttagaaggacttccttaacaatgactattataatgtcttacttaaaatacagttttgtattctgtcaatgcaaatataagacaggttgagccttaatcatgtaacaaaatattttgtagattacatattgatttttcaaaaattaaaaatgtatttcaaagt

SEQ ID NO: 1792 - DNA, 1649 bp, Homo sapiens
tcagcattccaaaatggcggcggcggcggtatctggtgcgcttggccgggcgggctggaggctcctgcagctgcgatgcctgcccgtggccgttgccgacaagccctggtgccgcgtgccttccatgcttcagctgtggggctaaggtcttcagatgagcagaagcagcagcctcccaactcattttctcagcagcattctgagacacagggggcagaaaaacctgatccagagtcttctcattcaccccccaggtatacagaccagggcggcgaggaggaggaggactatgaaagtgaggagcagttgcagcaccgcatcctgacggcagcccttgagtttgtgcccgcccacgggtggacagcagaggcgattgcagaaggagcccagtctctgggtctctccagtggcagcagccagcatgtttcgggaaggatgggcagtgagctaatactgcattttgtgacccagtgcaatacccggctcacacgtgtgctagaagaggagcagaagctggtacagttgggccaggcggagaagaggaagacagaccagttcctgagggatgcagtggaaaccagactgagaatgctgatcccatacattgagcactggccccgggccctcagcatcctcatgctccctcacaacatcccgtccagcctgagcctgctcaccagcatggtggatgacatgtggcattacgctggggaccagtccactgattttaactggtacacccgccgagccatgctggctgccatctacaacacaacagagctggtgatgatgcaggactcctctccagactttgaggacacttggcgcttcctggaaaaccgggttaatgatgcaatgaacatgggccacactgccaagcaggtaaagtccacaggagaggcactggtgcaaggactcatgggtgcagcagtgacgctcaagaacttgacaggtctaaaccagcgtcggtgagaggaaggggtataagctacaatgcctagaagagaatgagcggacagattgaaagagctttgaaaagtataaggtgccatccacataacctggtgttcacgagaacacactaaaggactcctgagtcactaccacagccacctggaaaccacaaggcatttgatgctaccgttctggtcagggattgggctgcttcttcagttcctaataccagaccaagcctcctgatgcctttctgcactgcaactgtgtgattgaaaaatgagatgttcatccaagcagtcaagccacagaaacccagcatgtccctgtcacaatctcatgggcaccttgatcatgtcttaaccttcccttaaccttggggctcccaagccagagtcaaggtctgacgccacctcaaggtgacagctcatctccagcacagcacaggcgtgtgcacacagaggtgttccttgcagccccctccctctcaggtgtcctgagatgctgctcctgggagccccctcagaaaactgcctcacctgagacaagtgcctgctggacagaggtgtgattccaggcctggtgtcacatgacaccagcatgcattgcaggattattagtgtattttgagtctgtaaaaataataaatatgtttgaagtagttaaaaaaaaaaaaaaaaaaaaaaaaaaaaaaa

SEQ ID NO: 1793 - DNA, 2229 bp, Homo sapiens
ctctctcacatttgtatttgttttttaaatggcagtattttagaagatttggagaaaagtccacataataatgttttcttaaaagcttttaaagtttttgctgtacttcaatttacttcttccatcagaaaactaagaacaaagtgttgctcagtctgttccgctgacctaaatttgtgttttcagcacttggctcagccaattcactgagtgaaggaattgctttatgaggcaaagcatgtgaaagttctaaagtatggttagattgtaggtcgtgctctatatggaaacatcaaaccattactacagagaaatgataaggcattggatccactattgaaattattatttttggatcaacaagttggtactttctgacttctgtatcttaacataagggaattttaggtaatgctaagtcagttgtctcattttttgtgataagttttggaatttttagttaattgaaataaataatgcttttaaatagaagtaaaaggtttataagtgtgcaaattgtagatttatcaattacctcagcaggtatcctgccatgtaattattagtgattagtgttaataagataatagattcaggtcttccaactatgcccttggattgtggcctactgtatgttattaaatggtctcttactatccaaaatgggagtagatgctgtggccccgtctcccttggcttttacgtcccatatccacccccattcatgtacaacatgtgaaatataaaaatctcatttcttgtcaaaatcagcactgcttatttgcatactcagcatcggatcagtgagtagttttataaaaaatccacgcacccaactcccttagttaaaacagattcttaattcataccatgaattcttaatttctgtaccatctatgttaatgatctgctgaaggtgactcaagattttcaaggtgtaatacagtttgatcatgtaccggacctggatatttaattttttttccctcacagttaatctcctccttgataaagcaataacactgctttgagtctgttgcctaatagcatgtcagaatcctctcctggatggtgattttataggaaagtttgtatgcatatcacccagtctatcttttaaaaattaagaaatttaaatgtatgctggaagtaatgacactatattgtggcattttattttaaaaattggggaaagttgcatatttttttaaaagtaagtgtttgagtaaaaaaattgaaggtacttttttaaggaaaaaaatttatatgccacagtttacatagacatttcagattcaacacgtactcttgaatataatggtttcttttacttggtcaaaatgcatgtatagcatttctttcatcttagttccttgtgtttgcctatgtggtcctttatatattttttattgtatcgaagaaacaaaactatcttcaaaaataagttaatttggatatatttgtcatatcaaactacaaagtgtacaaagttaagtttagcccttttctagaaagtgatctttaaaattaaaaatgctcctcttttaaattcaccaaatttatgtgtgggaaggcaccaaaatgattttgtaagtgccactgcaatattccctttcaagtgtggcctaaatttcaatcttaaggatggaatgcatgtctgctccttgttctgaaaaatgtaggcatctactacattttaaaacacagtgaaacatatacataagcctataaaaaaagatttgtgcaatttgaaagcctgttaattttttatgtagacatacctacacacgaaagggttaaattcacagccttactagttccttgcttccagtatttcaattggtctcctcccctcattattattattactactagtactattatttttgcacatagttaactgcccttcaatatgattcttaaaaagtgctgtttctgtggtatcgtattctctaaataatcatatttaattttttaaaacaaggttgcagtttctaattgtttcgttcctgtgtttttgctggtgtgtaataaaagcaagttttttcttttcatggttatttaatacattagctgcctgtaaataattcttgttataatgctctggaatgtgttgtagaagttgtattagattagttttaaacccttgtttgaaagccacattgttttggttatttctattaaattagaaaattgaaaaagttaaaaaaaaaaaaaaaaaaaaaaaaa

SEQ ID NO: 1794 - DNA, 405 bp, Homo sapiens
agcgtggtcgcggccgaggtaaaactcttataataagagtaataatagtaataggaacctgcttactgctcccttgtctgatacctgtatttctccaaatgataaaaaacttcgtcgcttaaccttagttcaccaaaatgcttcagcacaagcatactatataaatcactatcaatctattgcacgaaaatacataagtagcaaaaataagagtgagaactcccactgataaaaagtgagagtctcaaagaggggaaatgagggaagagagagaccctctcatattgttttatattgttttatactcagtacctcttttaagaaaaaaacaacaaggaagtagaaccaaagacaagcagcccagcgccaggcccaaaaccaggacctgcccgggcggccgctcga

SEQ ID NO: 1795 - DNA, 405 bp, Homo sapiens
agcgtggtcgcggccgaggtcctggttttgggcctggcgctgggctgcttgtctttggttctacttccttgttgtttttttcttaaaagaggtactgagtataaaacaatataaaacaatatgagagggtctctctcttccctcatttcccctctttgagactctcactttttatcagtgggagttctcactcttatttttgctacttatgtattttcgtgcaatagattgatagtgatttatatagtatgcttgtgctgaagcattttggtgaactaaggttaagcgacgaagttttttatcatttggagaaatacaggtatcagacaagggagcagtaagcaggttcctattactattattactcttattataagagttttacctgcccgggcggccgctcga

SEQ ID NO: 1796 - DNA, 532 bp, Homo sapiens
tcgagcggccgcccgggcaggtctggatataattcataatgtctggctccaaccatagattaccagacatgaagaaaaggagaaaaatacaacttataatgaagagaataataaattgatcaaaactaacccagagctgacagagattttagaattagtaaacaagggcattgaaatagttactatagctacattatagcataagtctgtatgttcagaaagttaagtggagacatagtaaatataaagaagacccaataaaacttatagagatgaaaagtacagtatctgagatgaaaaatgcactgaatggagttaatgacagattagatacaataaaataaaagattaatgaacttaaaaacaacaatagaaatcatccaaaacccaccacacagagaaaattataatattaaaatgagaacatcagtaagttgtggagtgcccaaaacagamaagtrggatgggagaacaaaaacaacattttkcaaaaatatttgaagaaacaatggacctcggccgcgaccacgct

SEQ ID NO: 1797 - DNA, 253 bp, Homo sapiens
  misc_feature 15, 28, 236: n = A,T,C or G
aaaaagacctgtagnagtgtttttaganttgcactgaattgcaataaatccaatggggagaaattggtagttataacagtactcaatgtcaatattcaatatcaatagtactcaataatactgatataaaaacatgataagacttccattgctgaacttggcttcaggttttcctcagtcaagtattagtttgcttcctgcatttcctatgcatttcttacaaaacttaagggtgntatcttatattttctga

SEQ ID NO: 1798 - DNA, 385 bp, Homo sapiens
agcgtggtcgcggccgaggtaaaacagagaatttcatattgattaacacctactactaaacagaatgatgcattaattaaatgccttgtcctaactgttataagctctgttagaaaaataaacatctcaccacaaactacagtgtcagctctttaataaatacataaaacagaagttagtagtcaatcagagttatatgaacaggttcatagtatattatgtgaaagtatcatattctccaatattctgtatcatttaagacaatttaagttacgtataattcaaagccagaaataataagaaatatgttcagtgataatttgcttctttcttagagctattttatattcaaatatttaatttacctgcccgggcggccgctcga

SEQ ID NO: 1799 - DNA, 256 bp, Homo sapiens
agcgtggtcgcggccgaggtaaatattgctgtattagacaattttaactgaagtaggttgtagaggctagaaacctgattaatagagcagtattagacaattctaactgaagtaggttgcagaggctagaagaaacctgattaatagagttagcttacaaagataaattttatgcagaaaagtattccaggtagataaaagagtagtgttattactctcaggtttacattaacagacctgcccgggcggccgctcg

SEQ ID NO: 1800 - DNA, 385 bp, Homo sapiens; identical to SEQ ID NO: 1798

SEQ ID NO: 1801 - DNA, 584 bp, Homo sapiens
tcgagcggccgcccgggcaggtccaatatctgataggaagatgtaatataaagaagggggatcaaatcctgcccttaaggtagacagaatctgtcaaggctttagagtgtaccatcaaagagttaacagccaacagaacaaaatttagcatcatcacaattttggaagtttttcaacagccctatgatttataaactgtcaatcactatttttacatataaatcatttccagtggtagtaaatgtgctaatattctcgatatatgtgaaaaatatcacttaaaattttttcctggaagaagcacttaataatttgtaaatcagaaacaaattatatgtactttctaagtagattagtgtatttctcatacatagatgatggcatagatttgcttttttagtaaattgtcagatatcagactctaacttatggaacaaatgaatataagtaaactcactcccatttgattgttttgtaaatgaaaaatgtaatattaaatttgtgagatgaatgtgtatgtagtaaatacattaataaaaatgtgtagatcaaaaaaaaaaaaaaaacctcggccgcgaccacgc

SEQ ID NO: 1802 - DNA, 619 bp, Homo sapiens
tcgagcggccgcccgggcaggtctgcagaggggatcgtggtgaatttcaatgaaaatccatttgaatcttgaggttcagatcttaaaaaagcaaaggacatgagagaagtaatattgttgcttgaaatttcattgcttatatctaaaagaaactcctatttttaagagaaatgttgaatctttgcaacgtggtagacgctcccacaaaactttctcctgaaataggagataaatgttggaaagaggcaatgtattgagtatgctgatagaggtggagttcagagacaggcaagcatacataagagtcaggatgtttttcagtattatctttacaaatgagtttcttacagtggtcaatgacaaaccaatttcattcaaagcttgcttcaataggcaatggtttgatgccaatatgttagctatttactttgaccaccgtatgcattaaaaagaagaaaaattaagaatactcaagcagaacctccaacttagatagcactttccacaaaaagtaatggagggatagactgaagttaaatgggatcaggcacgtgatgagatctcagaagtgtttgcacaataatgcagatactcattttacctcggccgcgaccacgct

SEQ ID NO: 1803 - DNA, 628 bp, Homo sapiens
cgagcggccgcccgggcaggtctgctagcaagtagtcgagaactagtctattttgatagatcgcatttctcatcagagtctcttgacgggcaagaacagtcaaggcttgatcggttttattagtaataatttctaaaacagcttgtaaccgtatgattcggttgagcatttagatgggggtctagtatcttcatgagccatcttgtgcccaagtggcaggtccatagtattgtatgattttttcagggggccatttattatctttttaatcacctatggctatgcttccttttttgtgggaagcatagactgggaagcctagaagtttacctgtttttatgggcagtaagaagaaagaaggcttaatggtgccaattgcacagctacctctccactgatcaggcagcttagcataagctctgtgtctacatatctagtataacctggtggggaccatccagtcctggtagaattctgggtgggcctaaacagtatgcaactttggaaatttactgaatggatttctttctgtgtaattggaactccaccatgtaactgkttttgkggtactattatagagcttttgtctaagacagctaagctgccttacaggatgagcgaatccttt

SEQ ID NO: 1804 - DNA, 599 bp, Homo sapiens
tcgagcggccgcccgggcaggtaaaggctcacaacactgaagatttcacatgaaagggtcatgattgatttgagcaatcaagggttacatgacaggggctgcatgcaccggtggtcagagagaaacagaacagggcagggagtttcacaatgttcttctatacaatgtctggaatctacgaataaaatcagtttttaagttatgagttgattttttattattaggtttaggccaggcaggcccagggctgcctgtctttaacttcacttccttgtttttttcttaaaacaggtactgagtataaaacaataaaacaatatgagtgggtctctctcttccctcatttcctctctttgagactctcactttttattagtgggagttctcactcttatttttgctatttatgtctttttgtgcaatagattgatagtgatttatacagtatgcttgtgctgaagtattttggtgaactaaggtagcgacgaagttttttatcatttggagaaatacaggtatcagacaagggagcagtaagcaggttcctgttactattattactcttattataagagttttacctcggccgcgaccacgct

SEQ ID NO: 1805 - DNA, 495 bp, Homo sapiens
tcgagcggccgcccgggcaggtaaaagcaaaaacagaataatttatttgaatccatctttccttgaaaaaaataaaaataagactttaatagtcatttccttaagtgttcacaagtcttctcaaaaatactactggtgattgaaaaaaaagagaaggcatagttttgtttttgtgacaaccatccttattactttgttgtacaaataacaagatagaaatttggaaataaaattgaaacataaatttagcattcttaacactaataaaaatttaataaaacaaagtctgctgaaaaatcgaacaatgtaaagtttccacatttgtaggtgagacaggatagtctcagtgttgatgatagtgaaagtgtagagtagaactaattgaggtttgtagagatatttcatacaaaacttacgaggaaacccctgtcactttcgttctccccgtcagcatgagaacgactctccactgaggacctcggccgcgaccacgct

SEQ ID NO: 1806 - DNA, 557 bp, Homo sapiens
  misc_feature 552: n = A,T,C or G
agcgtggtcgcggccgaggtctgcaatcccaggcagcagtgcagctatcactcagatcatggacacagcaccgtgggcatggatatgccatgctggagcccttagatgccctctagccactctggagcatcttccgatggacagtgggggaatctgaaggggctcgcttggtgctatggtctttcagaggctctgtagtgctctgtgggtggaccctgggggggcctgatctcatttgagctgattttccattacgcctgaagagtttctagggggctgcctctcactggcagagtagaaacacccactggagccaccacacacatccacctggcttcttagacaccgtcaaggaatggtgtcttcctcagtaccccacagctcccacactgtcatcccccagccaagggccatccctagaaaaactggtttactgttcctaaggaaaccattgtctatagcccttagccttgtggtttaggcaagaggccaggtcaggtgccctagagtgaggcaggggcttcagccaaagttgtgatcgcagcttctgangcagt

SEQ ID NO: 1807 - DNA, 330 bp, Homo sapiens
  misc_feature 15, 253, 272: n = A,T,C or G
ctgcgttacatgtancaaaagatgcaaacaaaatagattcaagttgttttgcagacagcacaatgatacaatattaggactacagaatctcagagtaaaccacaatgatttaaaggtaagatacacagaaataaaatgattttaacagaaaaatatgacattcctgaccttaggtctgggcacatgatgtctgacccctatagaggcaccttggctaaaatgggaatgacctagtgccacctgcccgggcggncgctctaaagggcgaattncagcacactggcggccgttactagtggatccgacctcggtaccaagcttggcgtaatc

SEQ ID NO: 1808 - DNA, 355 bp, Homo sapiens
agcgtggtcgcggccgaggtccttagaccaggcaatcattacggcagtggttcttcaacttcagcagcagcaaaacgatctggcgggggcttggtgaaacagactgctgggctcgaccaccagaatttctcattcagagggtctggcctgatcacttgcatttctaatcacttcccaggtgatgcagatgtttctggtccagggaccccagtttgagaaccactgtattaaaatttccttcatctctatagaaatggaaagattttttataagtcctctaatttgctttaagataaatgagatttcacttaattctgttggagaaattgttttacctgcccgggcggccgctcga

SEQ ID NO: 1809 - DNA, 483 bp, Homo sapiens
gagcggccgcccgggcaggaaaagcacaaatagaatataaggcaaacagtacaaagctgtgaaaagggtagcagagaactgaggcattcatttataaacaacatcacagaatataaacgaagatcatattttgtggatgtttgcattcacactgagctttactctttttttcctattaaggtctttcatttacaggtaatgatcaacaagacaaaaatatgtaaatgactaattataaatatgaaaaaattcagtgacattttctataactatttccccatgtcactgactgctaagttttcacttccttactaggctgagtttcaaatgaggtatccgcactcatctaagcttttcactactgcaaaacaagcttgactattgggaacattaacatttatcttcccaagaatcactcatcattctttggagaagaacctacttgttaaattaacagcatttaacctcggccgcgaccacgct

SEQ ID NO: 1810 - DNA, 396 bp, Homo sapiens
tcgagcggccgcccgggcaggtcctggggcctggtgccgggctgcctgtctttggttttacttccttgttgttttttctttttttcttaaaacaggtactgagtataaaacaatatgagaaggtttctctcttccctcatttcctccttttgagactcttactttttattagtgggagttctcacttttatttttgctacttatgtctttttgtgcaatagtttgatagtgatttatatagtacacttgtgctgaagcattttggtgaactaaggtagcgatgaagcttttttatcatttgaagaagtacaggtagcaaacaaggaagcagtaaacaggttcttattactattataaattctattataagagttttacctcggccgcgaccacgct

SEQ ID NO: 1811 - DNA, 471 bp, Homo sapiens
agcgtggtcgcggccgaggtaaatattttatgatgatacatatacaaatataatcttccaaaaaacaaatgtaaaactaatacaaatcactttttcaggaacaaagaaaatcatttagaaaatgtgattatgctaaaagaggcaggttaggtttccaaggctgctcaaggtggaagcttaagaccaacttttgtttgagtacacaagtgatatttacattttcatatactagtgatatacctgttgcatacttggcaaaataaaactgatagtaagtctataataataaaagaaacaacaattactaagtaaacaattctagatgatggaagagtaacctccatttaagctacagacttagatgtctaaaaatatgtgtcctgatctgtacagttagtgggagcacactatataaatcctttgcatgacaccattcaacaatattttttacctgcccgggcggscgctcga

SEQ ID NO: 1812 - DNA, 426 bp, Homo sapiens
tcgagcggccgcccgggcaggtctcagttgtgctgtggagaatggatcggagggacaagaggggcagcagggatggtgggctggagtagggtgctggcaatgagggagtctggctcagatgtgggatgtgtatggaagaatataaatgatggtgtggatgtcagggtgagggaggagacaaaaccacgatgacccctagctttgtggcctgaactgtgggtggctgaggggatcgttaattgaatggggcagactgaggcttgtgaggaagatcagagtctggttcttgacatgagatgcccttcagacatctcttcactcaggtccaactagggatacagaaacactgaatatttcaacagcagaaattgaatggggggattgatagcgctggcgagggaagcagacctcggccgcgaccacgct

SEQ ID NO: 1813 - DNA, 545 bp, Homo sapiens
tcgagcggccgcccgggcaggtaaattcttgtcactggcccaatctttttcttaagtttaaggaagctgcagagctggactacaagttacattcttcagctaatacgtgcttttctaatattttccccgagatattacatttagaaaatacgcaaagaaaccttttaggagtaaacaaaacgcacccgaactattcattataaaggaaagaataaaaaatccataaataatacattgtaatcaaataatataaagtattctgcagacataattttttttaattaataaactccttttaatttactcaccacaaatattaaaatgttcaagtgcacttgtttaattaataaagcattttatatgcaattattaagtgctaatcattaggaagtttacgttgttgaggcaaatcactagctcagacattaaaaaccattataaaaatatagctacaaggtcagtatcaaattacccttccataggacagctcaaggacagcttctatgtgatactagaaacttttttacctcggccgcgaccacgct

SEQ ID NO: 1814 - DNA, 501 bp, Homo sapiens
agcgtggtcgcggccgaggtaaggaaaagaataagtattcttgcatctggccttagaaatgtgaagttatattctcaagtttatttttttccaagtgtagctaaaatatttttgcaggtaaaataaagctgatagtacatgtgttgttcaaaccttgttaaacctaatattgaactatttttatatctgctgtctttcagaaggcaaataggaaactatatatttgcttaaaaattggcatttagtaaccttaattctttttatagaaggaatgacttaaagtattgtcccctctttttgcactaattgtggatttttttagatgcttctcaaaattttcagtgtgtaagctaaacaaaaactaaaactaagaattctcaaaaagacttgttcaaaacagggaaagactgatgaaaagtaaaatggactacttttgtaacttacctgtttgttaggaaatggaatggkttctttgatttacctgcccgggcggscgctcga

SEQ ID NO: 1815 - DNA, 529 bp, Homo sapiens
akcgtggtcgcggccgaggtgacaactgcagctaagtgtcggggacagaagagagactgaagkggccccgcamgccccctwtggcarrgmccactccgagaccatccggatcccgacctacaccagagcaaatgtctaatggtgagaagccgcttcaccaccctacagatccgcggtgcagagatttccctgctaaggtcctaactcctgaatgggtacggcgagtacacccgaagaatcgaaagtttctccattagattagcttcattttcgaatgctccgttttgcatgcttaattttgaaactagcccgtggtttggcagaatttgactgaattcaggggtgagagtttgatccagtccaagtgtatttgaatttgagcacgcagttcaaccagtgtttacaatggaatttctgaagacttgtgtacttagaagaaatgcatgcactgcggtttgcttctggaggaagcaaagttgtccaaaagccttcagttagaaggattagtactacctctccaaggagcact

SEQ ID NO: 1816 - DNA, 485 bp, Homo sapiens
agcgtggtcgcggccgaggtctgagagaggggtcagaaccaggcaaggggacgaatgagagtgaacctgagacactcaagctttaaggagaggaactgtctccatgaaggccccacatttgagaacactgggtaacagcctaagtggtctcctacggattccttcttttgagcagcttgttcctagcctggcattcaatgaacttgccaccaacagagaagcggggaaagaagaaaaaagaaactgtttgcagagaacgagcagagatcttgggaataccatcctccattgagagccagcccctcaaaagctcattcgtagggctgggtaaacacacaccttttgcactctatttttgaaattatgttcaggagtctacagactgttatctgtagaagaagccacttttgaaattttagtttatgtaaagtgttccaaaatgcatgaacagagtaattattttacctgcccgggcggccgctcga

SEQ ID NO: 1817 - DNA, 515 bp, Homo sapiens
agcggccgcccgggcaggtaaattgttattgggaatatatagatttgatgtgttattttgggatgtgtaatattaatgtcacaatcactacaggtcagatatttaggtgtgcttcggtccacaagtcttttgtcatattgtgctcgcttacctaaactgtaattgcctgataaaagataatatgacagtgctgaggtgacattcaaaatgagacgggatgcaataaatgattgccttcagtatttacacagaaaaaccacttgctctttcttggttatatttcatagggctagattgtttccatcgggcactattcttaattcactctataccgtgttgtcacatgctgcctctgggcagagaatcccacttaaaataagctttaggggatcttctagaaaagggtagtgtgctccaatttttatttctccttcttatgggggatgaggatcaattatagtacaagaccatttggaaaatatgcatatatattttacctcggccgcgaccacgct

SEQ ID NO: 1818 - DNA, 341 bp, Homo sapiens
agcgtggtcgcggccgaggtaaaaagcacaaaacttttggaatgttaatggataactactattagtctcaaaattctaggcatttctataaaacattggtcaatgtgactagtaagttaacgggaccaaggtttcaaagatcaatactgaaccttgataaataataagaggaaatgtaactccacaaaatgtttctgattaagtttgtgcccatgcaaaattaacataaatttcttaactcaagaatgaggaatattaaagcaatgtattttttcaacataaagcatgcattttctaatacattcttaaacatttcaaaattttacctgcccgggcggccg

SEQ ID NO: 1819 - DNA, 495 bp, Homo sapiens
  misc_feature 410: n = A,T,C or G
agcgtggtcgcggccgaggtgaaaaactgccttattttcagaagcatgtcttcattcaaagcttaggcttcaatagaaattcagactaatcactgaaatgactatttcaaactagtgaaatatctgggaaataaactgcttcaaaaatattttactgacatgaattttgctagtgaatacaaatacactgcctcaaataaggccatgtatgaatgaacttacaagatatttgagttaatcagtgtttgcatatagagaattagttctaaagttcttaaaaataaatttaggggctccctgaaattttatttaatactttgctaacttacactcttgttttatctccacaggtacattttaggttagctcatggtgaattctatttacaataagyggagcttggattaatngggttttgttatgaattatcttagtgactttagacactgtttccatttgatttttaactatttacctgcccgggcggccgctcga

SEQ ID NO: 1820 - DNA, 370 bp, Homo sapiens
tcgagcggccgcccgggcaggtccatataggctgtgctccaaaccactccatgaaacctgccactcaatttttagaaacataattgtacaggaagatttaattttcctgtctcagaatttggcagatgtattagggtttttttttttttaactaagggcagagcaracctaaatgaggcaatgwataagtatgtatacacaatccatctcaatgtacattttgtctgtccatgtatacaaataaaactttgtgttatacaaatacagaagatattttctgaggtctgtggagcatttacaaaaataatgatgttattttcatacttggagacaaagaaaatcttcattttacctcggccgcgaccacgct

SEQ ID NO: 1821 - DNA, 548 bp, Homo sapiens
tcgagcggccgcccgggcaggtccagtcaaggttgaaacggccattttgttatttctaacttctgctctagggttcagaaatgattttgcatctgatcattcaagatgagaatttgtttcacctgtacctgacagaataaaatggtaaattagcaatcagatcaccctttgtcaaaagaagtatgttctaaatgtatacactacaaactatctaataaatgatatctgcatactacatatttcatgttttattatgcaccattttagtggggaggaaaaacttcacagggatttattcaaaggatataaataatatcctaagaatgttgatttatacatatgagttctgtattaactgttaagtggtcatcttagctaaactataacaagcccctataatgtaaaagctgactcgaaaggcaccatgtaaagcactgaaatccacaatttagctgttatttcctcttccccaatacaaaattatctggtagtcttcactgttgactccatgataaaatgttccaaattcagactgctttaccgacaaa

SEQ ID NO: 1822 - DNA, 362 bp, Homo sapiens
tcgagcggccgcccgggcaggtaaagaacttttctccatgtcctccctcccttgcttcccacacaccccaaaaagatttgctcgttgcactgtgctgtttcttcttaaaaaccctatgcacaaacaggataaatgggttaaaaataattcacacaacttaacaaaaataaatgagggaaggagctgacgactgggggtggtggagggagaaggaagtgggcggagggtcaggaagtggagacatgcatcctttcattccgtcatgccaatgaaaggggtgttggcaggagtagcagcagcagcagcaatcctggctggccttcaacctttgcaaggcacctggagtctgggtttgtcattta

SEQ ID NO: 1823 - DNA, 600 bp, Homo sapiens
tcgagcggccgcccgggcaggtaaaaattataaccgattctaagtatatactttaagaaattcaggtttgactgtatctacttcataaatttatcattatctttttataactattagaaccagagttagaaagaagcagtttggctaatataaaaattatgtggattctgttagagtagttcagcttccttaaaataagcatatatcaactaacaaactaaatataaaagctaaacaagtgaaactgaagcagatttattgtaagatttggaagagtgcaggatgtttatcatagcacattattaatatttattattcttcctatgtagataagtaatgtcctagatttataccatagaaaaacaggtagagacgtttagctgtgagtgtacaagtataaatcaattaagtgccagattttgatcatcaccagttgctcattcaagtcctatgttgcaaagttactcttacccttttttacattacttgataaaggcaatgtttaattatgtatttcctgttaactagctggtagagttcatacctaaagtcagtaaataatgttaagaattttttccagacctcggccgcgaccacgct

SEQ ID NO: 1824 - DNA, 358 bp, Homo sapiens
ctggaaaaaattctgaacattatttactgactttaggtatgaactctaccagctagttaacaggaaatacataattaaacattgcctttatcaagtaatgtaaaaaaagggtaagagtaactttgcaacataggacttgaatgagcaactggtgatgatcaaaatctggcacttaattgatttatacttgtacactcacagctaaacgtctctacctgtttttctatggtataaatctaggacattacttatctacataggaagaataataaatattaataatgtgctatgataaacatcctgcactcttccaaatcttacaataaatctgcttcagtttcacttgtttagcttttat

SEQ ID NO: 1825 - DNA, 331 bp, Homo sapiens
  misc_feature 15, 22, 55, 74, 89, 98, 247, 284, 286, 289, 306: n = A,T,C or G
aaatggaaaaaaaanatcaatntaaactcatatggcttcaaaattgtaacctgtncccaatacttggtatgaanactgtggtaactaanaaagtgcanaagtttaaccatttcactaatttgtacatttttaggtaatacttgattaaaaacaaacacggtaagaacagtgtctgaattccaataataaaatattggctgccctaaaagcagtttgattgcaaagcaaattacagttagaatcccancaagggactgtaattggcatttacctgcccgggcggncnctngaaagggcgaattccancacactggcggccgttactagtgga

SEQ ID NO: 1826 - DNA, 302 bp, Homo sapiens
tcgagcggccgcccgggcaggtaaaacacacaaatgtatctgtttctgatgtcatgtttggtcaactgagggcagcaaaggtccataagaagagtgcaaggccattaaaaaaacagtgctctggccgggcgcggtggctcacatctgtaatcccagcactttgggaggccaaggcgggcggatcatctgaggtcagtttgagaccagcctggctaacacggtgaaaccctgtttctattaaaatacaaaaaattagctggtgtggtggcacgtgcctggaatacctcggccgcgaccacgct

SEQ ID NO: 1827 - DNA, 422 bp, Homo sapiens
  misc_feature 269, 291, 324, 388: n = A,T,C or G
ccacttttcagcacctacacagtgcctggcacatagtaggtgcccaataaatatttgtcagccatttgtgggcagtggggacaatggatcatagggacaccctttggaaaccatatataggaaagaacatcttacatcccatatgcctgcaattcttggttccaacttaggggtatttccactccactctgccctcctgtggcctgtcttattttctggaggaggactgggcctgcctcatcctagcatcttaaaccctctttccaganctgcagcttctccacgtggaanatgtctgctctggtgggcatacattcattttangagagaaactaaactcacaacccttcattttgggggatccatcttaaaaccaggaaggacctcngccgcgaccacgctaagggcgaattccagcacac

SEQ ID NO: 1828 - DNA, 491 bp, Homo sapiens
agcgtggtcgcggccgaggtaaaacaattcgaagatggcagaaccccgttataaatgggtacactataccatagatataaggcaaggaatcccaattactgatttttttgaatggcctttatttggctatatcattgatagtctatggtgtggaatttttggacacctaccagaacacatattaccataagtttccattttatcaggttctaagaaactttatttttgaaagaaaaaaatggacaagaaagaaaaatgtttctaaaagtgttatctgtgtataaataaagtggctgataaattagtgaaaaggaagaagtttggaaagcagaagtttttatgttgtataaaaagaaatacagtgaattcacattacttaagactgataatagattattgttgtgggtaaatgagtcattttatctgttgcatacttacgtgaaggctttcaaaaggtcagtaataatttacctgcccgggcggccgctcga

SEQ ID NO: 1829 - DNA, 468 bp, Homo sapiens
cgagcggccgcccgggcaggtctgcaggaactgtggggaggtaagagcttaggccacgtcccaggccccagagtcctcagccccagtcttcagaggccctcagggagccctcactaggacacgggagacagtcccaccccatggcctccagtctgaagagggaggtccagcccctccctaagggagcccacagtctgtgacatctcaggtgggaggaaaaggccctgtattcagggaattccaacttgaggagagaagcccagtctgaggccagagacccagaccctaccctctctgtctcacctccaggtctggggtctgcagatgatctacaagtcagtgaagctgccagtgctcaaagtccgcagcatgctgctggagacccctcaggggcggatccaggccaaaaagtggtcccgcgtgcccttctccgtgcctgactttgacttcctgcagcattgtgccgag

SEQ ID NO: 1830 - DNA, 323 bp, Homo sapiens
tcgagcggccgcccgggcaggtaaatataaagtagaatacgcagttttattattttcaagaaaaagaaagagaagctgctgacctttctcccccataaagtttttcaggatgatcaggtcacagtgtgtacgcaagagtcagctaattatggatattgtcatctcggtaactttgtaaaaaaacaaacaaaactggcattgttaattccaaaaagaaaaaaaaaagcagtaaaaaaaaaaagtcatatgcaacaccagacgcaacatggtttaatggaattaatagtttttttttttttttttacctcggccgcgaccacgct

SEQ ID NO: 1831 - DNA, 569 bp, Homo sapiens
agcgtggtcgcggccgaggtaaagtttctaattcacacaaaacacaaacatacacacactttctttcattccacacaaaacccaaaggtacaaggtggttttggaaaacaaacattttacattgcttcacctatgtggaccccaactaattagctgataatacattgaatagctataatataaagactattttgatatgaatcacatgagtaatacaggatgtgtttagagttccagagaaaaaacacaagtacttctacatgaaataattagaaaaacttaattaggcaggtaacatgatatgagatgaaagctttgattggacctaggcagtgtgtggtaaagaagggattttccaataaagaacagaatgagtaaaggtcatggatatatgaagagcatcccaatgtgtatggatcacagagaaatttgagggcaagctattaaaaaagacagttaatttggaatgaagaccttaggcagtcttaattgtcatactatggatttggattttaatacatgaccaaaatttacttacacaacttttacctgcccgggcggccgctcga

SEQ ID NO: 1832 - DNA, 302 bp, Homo sapiens
agcgtggtcgcggccgaggtaaaaacaggaaatatcaccaaaatctcaaaatatcttaatctatttttatacagtgaaatagctatgtacatgtgaactccagatacctgttaagctgtgactcttatcaaaactgtaatcaaatcttggatttgaataaacctataacactcaaaaccaattataacaatggaatttactttgtttactttaatcatacaagccaaatataaagtatagcaaaactgaaatgtaatcatacataattgtatcacatggaatttttacctgcccgggcggcc

SEQ ID NO: 1833 - DNA, 318 bp, Homo sapiens
tgagcggccgcccgggcaggtaaactgcagcctgatcaaatgtttcaaaagttgttcaaaagtaatcttagtccaacactgctcctctgacttttatctagagaaatagaaaagtttatatattaacgatttgtttcttttaagtacttgtgtacatttttctcttgcaataagtattaataattgaaaattattaaattgtcattttaatgttttttattaagtaagtttgatatgtttcttagcaacgaagacctgtggctcaaataggagcaaacaattcatggaatcaaattttacctcggccgcgaccacgct

SEQ ID NO: 1834 - DNA, 154 bp, Homo sapiens
  misc_feature 99, 127, 149: n = A,T,C or G
gaaaggcaaacctttcatgtcctgtttaggctctagcatgcttgttttcaaaacacaagctccagtctgcatgtttctgcagtcaactgtctgtcttanaaaatatctcaaaatcaatctgtccccntgtttgcttatgattctgcggnaatcc

SEQ ID NO: 1835 - DNA, 366 bp, Homo sapiens
acctcagcctccccaattgttgttattacaagtatgagctactgtgcccagtcccattggggtatttttctgtggttctcaagggttgcccacagagagacagaccacttttggactcargaaatctggatgtaccaagactaaatctatattaaccttctgatctactgtcaggatggcaaagtgttttatttcctgtgacaattctgatctaaaaatgtaagggatgaaaaaaaatgtaagggatgagatcaactatttgtaaatgttgtccsarargctgryttgcavgtgtgtrggtgcaaaccagtccatcacactcaacatatagaacaaatcctttttacctcggccgcgaccacggct

SEQ ID NO: 1836 - DNA, 236 bp, Homo sapiens
  misc_feature 15, 28, 113, 151, 189, 233: n = A,T,C or G
aaaggttatttgctnccgattatatgantcaagtgttataagttttagcttgaactactttgcagtaatttatttgacagatctctattctataaatgtgtaatgtgatgaanaaagagatctttcttttttaatgaaaacattaatgtgntaataccctgtatggataatgcttgacatttagtgggntccaaaatatattagtatattgttgaacatacattatgccttanaaa

SEQ ID NO: 1837 - DNA, 401 bp, Homo sapiens
ggccgcccgggcaggtcctctctctccctgggaagtgttgcttgataaagatgcagcttttaattaatgtaactgttcaagattacagccggtcatcagctttctaaccagtgcctcacagctctgctggaagagccttgctccggtgatggttgatttgccattctctgtcccagcccagagaagctcctctcactgtcaacgtgccatctgtcaggtgcatgttataaagctgtcatcatgatcagctcattcacgcaccagctttagctttgaggaactgccggccatggcgttgaagacctgctgaagcctccagccagacatctgatgttcaggtctcagggggtccttgctgcttgtgtagcctgacaggtgtggacctcggccgcgaccacgct

SEQ ID NO: 1838 - DNA, 478 bp, Homo sapiens
agcgtggtcgcggccgaggtgagggggtggggactcttgggaaactactcctgtaaaattgaagttggaggtaggcgtgggctgaggaaagaggaatcagattaattctctgggttgcaaagaggctattctgcaagccccttacagtggccctgaaagctcaataagtgttttgtacctcttgtaaatgtgccattgtgtgaagcattaaacccaacatctagaattcaggattcatccagaataaaaggatgtaaaatctttcccaacagaagagtgttacttttggtcagacaacttcatgggttcttactgcacattaaattatgacttatggaacattgcaatatattctcggtccttaagttatgacttatggaacatacaatatattctcggtccaagtgagtaagttctttgctttatgtgaatccaataaaaaatccaaagaattttacctgcccgggcggccgctcga

SEQ ID NO: 1839 - DNA, 468 bp, Homo sapiens
gagcggccgcccgggcaggtaaatcacagtgttttattctttttattggattagagatgtatagactggttacactcttttagtaattaacattaaattacactatgcacatttaacttatcaaagtcaaattaaacactatcttacaccctcttcccaacaactggagggtcttagaacatttctgtcccttctaatttacatgctattgttgtctagtattttagttgacactattcttttatatatacatatgtattcatatttataattttatttgcttgccattccatcttatatctaagaccatcactcggctcattttcctttatttatttatttttttaagatggagttttgctctttttgcccaggctggagtgcaatggcgtgatctcggctcactgcatcttctgcctcccaggttcaagggattctcctgcctcagacctcggccgcgaccacgct

SEQ ID NO: 1840 - DNA, 308 bp, Homo sapiens
tcgagcggccgcccgggcaggtttttwttttttttttttttttggtctaaaagtatttaatataaakaacagcwaagcacccttttgtcagaaagaaatccctatgacatatctcagattacactagtcaaatttccctttatctgaatttctttttggatacaaaataataatatcctcatctgtttcarataaatgttcagcattacccaatatggggatcataatgaattcagaaaaaaaatattgcattaaaaaaatagccaattcaaagttttttttagttttacctcggccgcgaccacgct

SEQ ID NO: 1841 - DNA, 427 bp, Homo sapiens
tcgagcggccgcccgggcaggtaaatacaatcttccaaaaagccagattgaaaaagtggctggttcgctttagaacagacaggcaacactataatatctagaatttggcaaagatctgttatataagatacagaatggtactgattaaatgattgttctttttaagccttttgtaagtctagaataataattttaataaataagcagatcaatttgttatattcatttctgtctctaaggatagcaaacatatttctgatacacattgtgaaaaatgttctgagaacatacctgtgcactttgacaaagactaaaaatttttggttatttggtaaaaagtgatctcctttttacttmaaaggktaacaacagccattgaatgtgttgatatatgtcattagaattttacctcggccgcgaccacgct

SEQ ID NO: 1842 - DNA, 315 bp, Homo sapiens
agcgtggtcgcggccgaggtaaaatgatttaatygacaaattcttgtgatttacatttcagtaatcaactgcaaaagtgaggaagtaattcatgggcctgtagtgcttttgaaaataatatttatgactcataaaaatgtacattcataatagtatgacatggacatattttaagaaagttcaagcatatacaagcattgtttaatctcacaaaatatattaattttgttgggaatatgtgcattataaaagggtctttagtttaccaaagggttcaacactaagctatttttacctgcccgggcggccgctcga

SEQ ID NO: 1843 - DNA, 340 bp, Homo sapiens
agcgtggtcgcggccgaggtaaagaacttttatttatcaaatcctttgccatgaatgagagcaccaaataacatatcaatacccaactgcctgattcctttacagcagtaagaaaagtcagtaaaacatttgtacagtccaagtactacaacaccaagatcccctcttcaagtgagagtgagccaaagcttccttagtatcatctcaagtcaatgtcttttcactataccattaagatgaaaataactaagagcactgacacaattttcttgctctttccatctaaaaatgtgggtttcctgtggtgtggctaattttacctgcccgggcggccgctcga

SEQ ID NO: 1844 - DNA, 957 bp, Homo sapiens
  misc_feature 684,685: n = A,T,C or G
gaaggcaagaaaacgggttagggtcttaggagagttggacacattcaaaacacaatatgtgattaagaagattaaagattaatacttattgatggattactatgtgccaaacttccaaccgaatcctgacaacaattccttaagatgtggaaactgcagttcactgaggttgacatttccgggttcatacaacaaggatggggatgaatgactgtaactgcagacctttacaaggacaatgagagctcctaatggaggcgctaaggcagctggcccagaggcagtaaagttggcaacctcattggctccccttgagagtccggcccaccacaaccattcttttagatatgcatggtcacttagatctgctttcatggttcctatcctgtttggcaccatgacaagaaaacaaacaagttatggacttagaagatatagacttatggtggagacagagacatggaataataacccaaagtagctcatcttcctagaggcctattcttcctcttcctccagccattgcctgtttgacatgagatgtgtccttcgataagtcagtagtggattacctcaaggcaggggacaactaaggctccaatagaaaggatgaattgcaagaatgggacagagatcatattctcaaaaggactttttaataaaaactcactgaaagcaattaawwtttcttgatgatttaattttctgcctggacaaagctgctgttttaactgtgtttacaaagcttctactgctggccatggcttctggaattggtctctgatggctggatctttcacactggagccctggttttgattatccaagagatgaaagaatcactccctaaaccttccgttgtccactacagagcttctcttccaccccaccatgctgcctttcctgtcaggatgacaacagcaaagacagcaataataaaagaaaaagcttaaaaaa

SEQ ID NO: 1845 - DNA, 516 bp, Homo sapiens
ccaaagctgggaccactgaagggctacatcctcaatggatgggtggaggaggcagagaaagaccttagggaaccactctgccttgacctaggcgctcagctcccttgagaatgtatagccacaggtttactccctcggggtttgagattgaaaattgcactccttgcattgtccaagaaactacaagcagagacattccacaaggtggtccccacagccagtgttcccaggtccgctctggagggacacagctgcaactcagacccccataggatccccacttgagctcaccatcccacattacaaaatacacaaaagaacaagccaccatgagatgcagtcttcagaaagaacccatggaagagtcagacctcaagaacttcagacaatgtaattatcaactctagaaataagagaaggttcaagttgtgtgaataaatgaaaaagtgtatcaaaaataaaataaagaaataagatgctacttttagacacagaaatattaagtaaataaatgga

SEQ ID NO: 1846 - DNA, 671 bp, Homo sapiens
gtggtgagcgcctggattccaaaagggttaagaattcggagatgtgacctgcctcattctgaagaacgtggcccagcatgtgtatgaagcaattaattgctccacaaaccctgaaaatttgatcactggccagagtaacgctgaggagccatcctgtcttctgcttgagtgtcttcactctggggattctggcaggctggtttcctggccagatgcttctcatccacacctgtggacctcaggaaaccaaaggtgacctctgttggcatggccttgacttcctttccaccaatgcccatgagatgtggaaattgagcgaacatccacaccagaaccatacactcaaacaagcaggttggggcagggaaactccatcacatcatggtgaggcagagatgctgcagccacccagatcattgtgtagtagaggtggcaccattttactatgtgtcctccctgcactcagtgaagtctgtgaagggaggggtcagtgcagcaaggagctcgctctgccccagaggagagagtggaatgttcgaggacacatgaaagcagttactctgcctaccttttaaaactctttcctcctggggaactggtttattctgtactcctaaacagactatacccatgtattcactccttctataaataaaagaaaaaaacctaaa

SEQ ID NO: 1847 - DNA, 5263 bp, Homo sapiens
  misc_feature 848,1060,1248,1377,2310,2319,2839: n = A,T,C or G
agtggaaggagcaggcgcttgagctcgagcgacggcgctggcggagacgccggctgctcctcccctccccgccggtattaatctctggagaagacacatccacagttagcactttcttcagatgctgacgctcggtgaacagttgcctttggtcacaagatttagaagacacagtgtccatcctcccagattggatctctttttcatatggatcttctgtttctatgtctttttaaaaaataactttttgggaaaccttttggattacaactgttcatcctcacctatgcaaagaaagggaagctattgctgggattttgaggagcttttcctaaaaggattgtacaccttagaagtgcttaaggaagagtgatgaagataggcatgaagccttcgtctcacagctgcatgcgtagtcactgttgaagcaaatgcctacctaatttgacactcttggtgtgtttaaaaaatttttttgagtttgcaaataagcatattaagtctactgatggagccttcgggcagtgaacagttatttgaggaccctgatcctggaggcaaatcccaagatgcagaggccagaaagcagacagaatcagaacaaaaattgtctaaaatgacccacaatgctttggagaacattaacgtgattggccaaggcttgaagcatctcttccagcaccagcgcaggaggtcatcagtgtctccacatgatgtgcagcaaattcaggcagatccagaacctgaaatggatctggaaagccagaacgcatgtgctgagattgatggtgtccccacccaccccacagctctgaatcgtgtcctgcagcagattcgagtgccacccnagatgaagagagggacaagcttgcatagtaggcggggcaagccagaggccccaaagggaagtccccaaatcaacaggaagtctggtcaggagatgacagctgttatgcagtcaggccgacccatgtcttcatccacaactgatgcacctaccggctctgctatgatggaaatagcttgtgctgctgctgctgctgctgctgcatgtctaccnggagaggagggaactgcggagcggatcgaacggttggaagtaagcagccttgcccaaacatccagtgcagtggcctccagtaccgatggcagcatccacacagactctgtggatggaacaccagaccctcagcgcacaaaggctgccattgctcacctgcagcagaagatcctgaagctcacagaacnaatcaagattgcacaaacagcccgggacgacaacgttgctgaatacttgaagcttgccaacagtgcagacaaacagcaggctgcccgcatcaagcaagtctttgagaagaagaaccagaaatctgcccnaactatcctccagctgcaaaagaaacttgagcactaccacaggaagctcagagaggtagagcagaatgggatcccccggcagccaaaggatgtcttcagggacatgcaccagggtctgaaggatgtaggagcaaaggtgactggcttcagtgaaggtgtggtggatagtgtcaaaggtgggttttccagcttctcccaggccacccattcagcagcaggcgctgtagtctcaaagcccagagagattgcctcactcattcggaacaaatttggcagtgcagacaacatccccaacctgaaggactctttagaggaagggcaagtggatgatgcggggaaggctttgggagtgatttcaaactttcagtctagcccaaaatatggtagtgaagaagattgttctagtgccacttcaggctcagtgggagccaacagcaccacagggggcatcgctgtaggagcatccagctccaaaacaaacaccctggacatgcagagctcaggatttgatgcactactacatgagatccaggagatccgggaaacccaggccagactagaggaatcctttgagactctcaaggaacattatcagagggactattccttaataatgcagaccttacaggaggagcgatatagatgtgaacgattggaagaacagctaaatgacctaacagagctccaccagaatgaaatcttgaacttgaagcaggaactggcaagcatggaagaaaaaatcgcgtatcagtcctatgaacgggcccgggacatccaggaggccctggaggcatgccagacgcgcatctccaagatggagctgcagcagcagcagcagcaggtggtgcagctagaagggctggagaatgccactgcccggaaccttctgggcaaactcatcaacatcctcctggctgtcatggcagtcctttnggtctttgnctccactgtagccaactgtgtggtccccctcatgaagactcgcaacaggacgttcagcactttattccttgtggtttttattgcctttctctggaagcactgggacgccctcttcagctatgtggaacggttcttttcatcccctagatgatgctggcacagaaggcattgttccctaccctctggcgagtgcatgcagcagagagttagacagcaacttacctactctgaagttttctacaacaaaaaaagagttgagtgaatctgtttacatttagaataatgtttttttcttcaagagacgcaattgcaatagtattttttagattttatccaagaagttttttgggcgaaaatcttggatcatttttatgtagcatgattttccttgggatgcaaatcttaaaacagtcctttaatatgaaccaacaatctggagcacaccgaagggcaatctaaattgtggcttgaaggactgcactaaaacccactaaaaagatgcgaaaacctgatgagggcnaaccagttaaacctaacaccctgccttgtctgggctcatcacctctccctatcccagactaactttactgtgaaatcctacacattccatgtctgaatttttggattcggggtggattttcgttgtccgtggaagaacacatggatctctctggctttctcacccaagttggccacttacgctaatcctggaagtatgatcacttttgaacctgccccttaaccttgacgaggatacaaaagtgaaagcatcatcccccaaaggatcactgcacagtcctactacagtatttttaagtagccctctaaatacttaattttaagcaaaatcccttggccgcacttttaaggtttttttatatgtgtatagttaccaacctaaaaataaaaaatccgaacagcatacttgaagaatgtaatactcaaactctcagtgcttccttatggtttctaataggattttttattattgttattattattattgggtttttttggacagggttgggagggtcttttatttttcctttgaaataaagaagtgatgtttttaaatgaagaaatgtgtggatatttaagtgtgctgctccctcttgtcttgaaacagtttgagtaagaaagtcttgctgtaaatgctgccctctgccgcctttgttttgagatgcagtttaaactccctctggctgctgctgctgctttttggtgtcccgacatacctacgcccccgttttatgggtttggcttagttgaagaggaaagggttgtgcaaggagagcaggaggctgtttccaaaaaccagtgtagtaggatagggattttttttttttttttgccccaagaaaacgttcacccagtgatcttgggctggggttgtctttaggaaaagttgagactataagagtcataaataagtccttgtgtttccttaatttattttgttaacacccctaattacaaccaaagtgatgatgtggagtcttctgtcttcattttggccccagcattcttaatttcaaagctttattctgtctgcctaagagaatcaaccaaaggtgattctcctaaagagcagtgaaggaaatgtcaggttagcaggacccaagttttgggtgtgaaatgttgccagcttcctataatgtaaacggacttgttaacctaacctaattatgctcagtggacttctatagatggttttgaaaaatgaactgagctgccttcccgcatcgcataaccagttccatcatcctggtggaacttgaacatttagagtttatctagagagcttggttaatctttccatattatttgtagtattggtcacaaatgctgttccctcttagcctcattctgtgcaaccaagtgcatataagatgccctgaaaagagtaacaaagtatgctttgcctgtttccacttaccaggaaattccttcagaactagattagcattgccctgcctgtctgaaaggacagtttacctaatggtgccagcctccttttgctttggcaagctggatttctcagagccagcatgttgtttccataactactttgatattttaactcaggtactccagtcttcaccccaacctcagctgattgtagtacacctgctagctctgttgccccctcaaaactgcacccagagcagggccacaagggtgctttttttctttaaaaaaaaaaaaattagaaccaattcatgttcatgccaaaaacaaattgtccccaagcctatatgtattaaaatgttaactttgcctaaaaatattgcagtgactttttaggcaggagtgccaaaggacactatgaactttttgaactgacagtttctcctaactttctgctttagcgtaattgctcagagtagagagcccccacaaagttatttaaaagatgccctagcagcaatccaccagtttttctaagctagaacctttgagtcccccaaactgcctgaagacttaagttttgtgggcactggaagtcactttgatagatggattgaaactgttcctatttgccctgggacggtttctatctatcaaaggaaggttttcacctgtagaaagccccctgcctccagccaaatagtcccatgctgactttctatcttcctttctcaaactgtcttaggaaggaccttcagtgcagatcaggtgcagtaatggctttcttgtcccttaattattcaccagacccagaagttgtacgcatttaatgctgtttgtaaccatgcatctgttttcattctttgctgtaccttttgctgcccatcctgttacttttgagtttctttcattgtggttgttcttgggttcttttgtcttgtcagagctcttctataacctcgctctaatggcttaacagttgttctgggtggaaacgtcccctcatttgaatgctcctctaaaaaaaaaaaaaaaa

SEQ ID NO: 1848 - protein, 184 aa, Homo sapiens [sequence omitted]

SEQ ID NO: 1849 - protein, 132 aa, Homo sapiens
MVEAFCATWKLTNSQNFDEYMKALGVGFATRQVGNVTKPTVIISQEGDKVVIRTLSTFKNTEISFQLGEEFDETTADDRNCKSVVSLDGDKLVHIQKWDGKETNFVREIKDGKMVMTLTFGDVVAVRHYEKA

SEQ ID NO: 1850 - protein, 320 aa, Homo sapiens
AKVTGFSEGVVDSVKGGFSSFSQATHSAAGAVVSKPREIASLIRNKFGSADNIPNLKDSLEEGQVDDAGKALGVISNFQSSPKYGSEEDCSSATSGSVGANSTTGGIAVGASSSKTNTLDMQSSGFDALLHEIQEIRETQARLEESFETLKEHYQRDYSLIMQTLQEERYRCERLEEQLNDLTELHQNEILNLKQELASMEEKIAYQSYERARDIQEALEACQTRISKMELQQQQQQVVQLEGLENATARNLLGKLINILLAVMAVLLVFVSTVANCVVPLMKTRNRTFSTLFLVVFIAFLWKHWDALFSYVERFFSSPR

SEQ ID NO: 1851 - protein, 653 aa, Homo sapiens
  variant 114,247,290,601,604: Xaa = Any amino acid
MEPSGSEQLFEDPDPGGKSQDAEARKQTESEQKLSKMTHNALENINVIGQGLKHLFQHQRRRSSVSPHDVQQIQADPEPEMDLESQNACAEIDGVPTHPTALNRVLQQIRVPPXMKRGTSLHSRRGKPEAPKGSPQINRKSGQEMTAVMQSGRPMSSSTTDAPTGSAMMEIACAAAAAAAACLPGEEGTAERIERLEVSSLAQTSSAVASSTDGSIHTDSVDGTPDPQRTKAAIAHLQQKILKLTEXIKIAQTARDDNVAEYLKLANSADKQQAARIKQVFEKKNQKSAXTILQLQKKLEHYHRKLREVEQNGIPRQPKDVFRDMHQGLKDVGAKVTGFSEGVVDSVKGGFSSFSQATHSAAGAVVSKPREIASLIRNKFGSADNIPNLKDSLEEGQVDDAGKALGVISNFQSSPKYGSEEDCSSATSGSVGANSTTGGIAVGASSSKTNTLDMQSSGFDALLHEIQEIRETQARLEESFETLKEHYQRDYSLIMQTLQEERYRCERLEEQLNDLTELHQNEILNLKQELASMEEKIAYQSYERARDIQEALEACQTRISKMELQQQQQQVVQLEGLENATARNLLGKLINILLAVMAVLXVFXSTVANCVVPLMKTRNRTFSTLFLVVFIAFLWKHWDALFSYVERFFSSPR

SEQ ID NO: 1852 - DNA, 4559 bp, Homo sapiens
gcggccgccccattcccagaccggccgccagcccatctggttagctcccgccgctccgcgccgcccgggagtcgggagccgcggggaaccgggcacctgcacccgcctctgggagtgagtggttccagctggtgcctggcctgtgtctcttggatgccctgtggcttcagtccgtctcctgttgcccaccacctcgtccctgggccgcctgataccccagcccaacagctaaggtgtggatggacagtagggggctggcttctctcactggtcaggggtcttctcccctgtctgcctcccggagctaggactgcagaggggcctatcatggtgcttgcaggccccctggctgtctcgctgttgctgcccagcctcacactgctggtgtcccacctctccagctcccaggatgtctccagtgagcccagcagtgagcagcagctgtgcgcccttagcaagcaccccaccgtggcctttgaagacctgcagccgtgggtctctaacttcacctaccctggagcccgggatttctcccagctggctttggacccctccgggaaccagctcatcgtgggagccaggaactacctcttcagactcagccttgccaatgtctctcttcttcaggccacagagtgggcctccagtgaggacacgcgccgctcctgccaaagcaaagggaagactgaggaggagtgtcagaactacgtgcgagtcctgatcgtcgccggccggaaggtgttcatgtgtggaaccaatgccttttcccccatgtgcaccagcagacaggtggggaacctcagccggactactgagaagatcaatggtgtggcccgctgcccctatgacccacgccacaactccacagctgtcatctcctcccagggggagctctatgcagccacggtcatcgacttctcaggtcgggaccctgccatctaccgcagcctgggcagtgggccaccgcttcgcactgcccaatataactccaagtggcttaatgagccaaacttcgtggcagcctatgatattgggctgtttgcatacttcttcctgcgggagaacgcagtggagcacgactgtggacgcaccgtgtactctcgcgtggcccgcgtgtgcaagaatgacgtggggggccgattcctgctggaggacacatggaccacattcatgaaggcccggctcaactgctcccgcccgggcgaggtccccttctactataacgagctgcagagtgccttccacttgccagagcaggacctcatctatggagttttcacaaccaacgtaaacagcatcgcggcttctgctgtctgcgccttcaacctcagtgctatctcccaggctttcaatggcccatttcgctaccaggagaaccccagggctgcctggctccccatagccaaccccatccccaatttccagtgtggcaccctgcctgagaccggtcccaacgagaacctgacggagcgcagcctgcaggacgcgcagcgcctcttcctgatgagcgaggccgtgcagccggtgacacccgagccctgtgtcacccaggacagcgtgcgcttctcacacctcgtggtggacctggtgcaggctaaagacacgctctaccatgtactctacattggcaccgagtcgggcaccatcctgaaggcgctgtccacggcgagccgcagcctccacggctgctacctggaggagctgcacgtgctgccccccgggcgccgcgagcccctgcgcagcctgcgcatcctgcacagcgcccgcgcgctcttcgtggggctgagagacggcgtcctgcgggtcccactggagaggtgcgccgcctaccgcagccagggggcatgcctgggggcccgggacccgtactgtggctgggacgggaagcagcaacgttgcagcacactcgaggacagctccaacatgagcctctggacccagaacatcaccgcctgtcctgtgcggaatgtgacacgggatgggggcttcggcccatggtcaccatggcaaccatgtgagcacttggatggggacaactcaggctcttgcctgtgtcgagctcgatcctgtgattcccctcgaccccgctgtgggggccttgactgcctggggccagccatccacatcgccaactgctccaggaatggggcgtggaccccgtggtcatcgtgggcgctgtgcagcacgtcctgtggcatcggcttccaggtccgccagcgaagttgcagcaaccctgctccccgccacgggggccgcatctgcgtgggcaagagccgggaggaacggttctgtaatgagaacacgccttgcccggtgcccatcttctgggcttcctggggctcctggagcaagtgcagcagcaactgtggagggggcatgcagtcgcggcgtcgggcctgcgagaacggcaactcctgcctgggctgcggcgtggagttcaagacgtgcaaccccgagggctgccccgaagtgcggcgcaacaccccctggacgccgtggctgcccgtgaacgtgacgcagggcggggcacggcaggagcagcggttccgcttcacctgccgcgcgccccttgcagacccgcacggcctgcagttcggcaggagaaggaccgagacgaggacctgtcccgcggacggctccggctcctgcgacaccgacgccctggtggaggacctcctgcgcagcgggagcacctccccgcacacggtgagcgggggctgggccgcctggggcccgtggtcgtcctgctcccgggactgcgagctgggcttccgcgtccgcaagagaacgtgcactaacccggagccccgcaacgggggcctgccctgcgtgggcgatgctgccgagtaccaggactgcaacccccaggcttgcccagttcggggtgcttggtcctgctggacctcatggtctccatgctcagcttcctgtggtgggggtcactatcaacgcacccgttcctgcaccagccccgcaccctccccaggtgaggacatctgtctcgggctgcacacggaggaggcactatgtgccacacaggcctgcccagaaggctggtcgccctggtctgagtggagtaagtgcactgacgacggagcccagagccgaagccggcactgtgaggagctcctcccagggtccagcgcctgtgctggaaacagcagccagagccgcccctgcccctacagcgagattcccgtcatcctgccagcctccagcatggaggaggccaccggctgtgcagggttcaatctcatccacttggtggccacgggcatctcctgcttcttgggctctgggctcctgaccctagcagtgtacctgtcttgccagcactgccagcgtcagtcccaggagtccacactggtccatcctgccacccccaaccatttgcactacaagggcggaggcaccccgaagaatgaaaagtacacacccatggaattcaagaccctgaacaagaataacttgatccctgatgacagagccaacttctacccattgcagcagaccaatgtgtacacgactacttactacccaagccccctgaacaaacacagcttccggcccgaggcctcacctggacaacggtgcttccccaacagctgataccgccgtcctggggacttgggcttcttgccttcataaggcacagagcagatggagatgggacagtggagccagtttggttttctccctctgcactaggccaagaacttgctgccttgcctgtggggggtcccatccggcttcagagagctctggctggcattgaccatgggggaaagggctggtttcaggctgacatatggccgcaggtccagttcagcccaggtctctcatggttatcttccaacccactgtcacgctgacactatgctgccatgcctgggctgtggacctactgggcatttgaggaactggagaatggagatggcaagagggcaggcttttaagtttgggttggagacaacttcctgtggcccccacaagctgagtctggccttctccagctggccccaaaaaaggcctttgctacatcctgattatctctgaaagtaatcaatcaagtggctccagtagctctggattttctgccagggctgggccattgtggtgctgccccagtatgacatgggaccaaggccagcgcaggttatccacctctgcctggaagtctatactctacccagggcatccctctggtcagaggcagtgagtactgggaactggaggctgacctgtgcttagaagtcctttaatctgggctggtacaggcctcagccttgccctcaatgcacgaaaggtggcccaggagagaggatcaatgccacaggaggcagaagtctggcctctgtgcctctatggagactatcttccagttgctgctcaacagagttgttggctgagacctgcttgggagtctctgctggcccttcatctgttcaggaacacacacacacacacactcacacacgcacacacaatcacaatttgctacagcaacaaaaaagacattgggctgtggcattattaattaaagatgatatccagtctcc

SEQ ID NO: 1853 - DNA, 3606 bp, Homo sapiens
gcggccgccccattcccagaccggccgccagcccatctggttagctcccgccgctccgcgccgcccgggagtcgggagccgcggggaaccgggcacctgcacccgcctctgggagtgagtggttccagctggtgcctggcctgtgtctcttggatgccctgtggcttcagtccgtctcctgttgcccaccacctcgtccctgggccgcctgataccccagcccaacagctaaggtgtggatggacagtagggggctggcttctctcactggtcaggggtcttctcccctgtctgcctcccggagctaggactgcagaggggcctatcatggtgcttgcaggccccctggctgtctcgctgttgctgcccagcctcacactgctggtgtcccacctctccagctcccaggatgtctccagtgagcccagcagtgagcagcagctgtgcgcccttagcaagcaccccaccgtggcctttgaagacctgcagccgtgggtctctaacttcacctaccctggagcccgggatttctcccagctggctttggacccctccgggaaccagctcatcgtgggagccaggaactacctcttcagactcagccttgccaatgtctctcttcttcaggccacagagtgggcctccagtgaggacacgcgccgctcctgccaaagcaaagggaagactgaggaggagtgtcagaactacgtgcgagtcctgatcgtcgccggccggaaggtgttcatgtgtggaaccaatgccttttcccccatgtgcaccagcagacaggtggggaacctcagccggactactgagaagatcaatggtgtggcccgctgcccctatgacccacgccacaactccacagctgtcatctcctcccagggggagctctatgcagccacggtcatcgacttctcaggtcgggaccctgccatctaccgcagcctgggcagtgggccaccgcttcgcactgcccaatataactccaagtggcttaatgagccaaacttcgtggcagcctatgatattgggctgtttgcatacttcttcctgcgggagaacgcagtggagcacgactgtggacgcaccgtgtactctcgcgtggcccgcgtgtgcaagaatgacgtggggggccgattcctgctggaggacacatggaccacattcatgaaggcccggctcaactgctcccgcccgggcgaggtccccttctactataacgagctgcagagtgccttccacttgccagagcaggacctcatctatggagttttcacaaccaacgtaaacagcatcgcggcttctgctgtctgcgccttcaacctcagtgctatctcccaggctttcaatggcccatttcgctaccaggagaaccccagggctgcctggctccccatagccaaccccatccccaatttccagtgtggcaccctgcctgagaccggtcccaacgagaacctgacggagcgcagcctgcaggacgcgcagcgcctcttcctgatgagcgaggccgtgcagccggtgacacccgagccctgtgtcacccaggacagcgtgcgcttctcacacctcgtggtggacctggtgcaggctaaagacacgctctaccatgtactctacattggcaccgagtcgggcaccatcctgaaggcgctgtccacggcgagccgcagcctccacggctgctacctggaggagctgcacgtgctgccccccgggcgccgcgagcccctgcgcagcctgcgcatcctgcacagcgcccgcgcgctcttcgtggggctgagagacggcgtcctgcgggtcccactggagaggtgcgccgcctaccgcagccagggggcatgcctgggggcccgggacccgtactgtggctgggacgggaagcagcaacgttgcagcacactcgaggacagctccaacatgagcctctggacccagaacatcaccgcctgtcctgtgcggaatgtgacacgggatgggggcttcggcccatggtcaccatggcaaccatgtgagcacttggatggggacaactcaggctcttgcctgtgtcgagctcgatcctgtgattcccctcgaccccgctgtgggggccttgactgcctggggccagccatccacatcgccaactgctccaggaatggggcgtggaccccgtggtcatcgtgggcgctgtgcagcacgtcctgtggcatcggcttccaggtccgccagcgaagttgcagcaaccctgctccccgccacgggggccgcatctgcgtgggcaagagccgggaggaacggttctgtaatgagaacacgccttgcccggtgcccatcttctgggcttcctggggctcctggagcaagtgcagcagcaactgtggagggggcatgcagtcgcggcgtcgggcctgcgagaacggcaactcctgcctgggctgcggcgtggagttcaagacgtgcaaccccgagggctgccccgaagtgcggcgcaacaccccctggacgccgtggctgcccgtgaacgtgacgcagggcggggcacggcaggagcagcggttccgcttcacctgccgcgcgccccttgcagacccgcacggcctgcagttcggcaggagaaggaccgagacgaggacctgtcccgcggacggctccggctcctgcgacaccgacgccctggtggaggacctcctgcgcagcgggagcacctccccgcacacggtgagcgggggctgggccgcctggggcccgtggtcgtcctgctcccgggactgcgagctgggcttccgcgtccgcaagagaacgtgcactaacccggagccccgcaacgggggcctgccctgcgtgggcgatgctgccgagtaccaggactgcaacccccaggcttgcccagttcggggtgcttggtcctgctggacctcatggtctccatgctcagcttcctgtggtgggggtcactatcaacgcacccgttcctgcaccagccccgcaccctccccaggtgaggacatctgtctcgggctgcacacggaggaggcactatgtgccacacaggcctgcccagaaggctggtcgccctggtctgagtggagtaagtgcactgacgacggagcccagagccgaagccggcactgtgaggagctcctcccagggtccagcgcctgtgctggaaacagcagccagagccgcccctgcccctacagcgagattcccgtcatcctgccagcctccagcatggaggaggccaccggctgtgcagggttcaatctcatccacttggtggccacgggcatctcctgcttcttgggctctgggctcctgaccctagcagtgtacctgtcttgccagcactgccagcgtcagtcccaggagtccacactggtccatcctgccacccccaaccatttgcactacaagggcggaggcaccccgaagaatgaaaagtacacacccatggaattcaagaccctgaacaagaataacttgatccctgatgacagagccaacttctacccattgcagcagaccaatgtgtacacgactacttactacccaagccccctgaacaaacacagcttccggcccgaggcctcacctggacaacggtgcttccccaacagc

SEQ ID NO: 1854 - DNA, 3453 bp, Homo sapiens
atgccctgtggcttcagtccgtctcctgttgcccaccacctcgtccctgggccgcctgataccccagcccaacagctaaggtgtggatggacagtagggggctggcttctctcactggtcaggggtcttctcccctgtctgcctcccggagctaggactgcagaggggcctatcatggtgcttgcaggccccctggctgtctcgctgttgctgcccagcctcacactgctggtgtcccacctctccagctcccaggatgtctccagtgagcccagcagtgagcagcagctgtgcgcccttagcaagcaccccaccgtggcctttgaagacctgcagccgtgggtctctaacttcacctaccctggagcccgggatttctcccagctggctttggacccctccgggaaccagctcatcgtgggagccaggaactacctcttcagactcagccttgccaatgtctctcttcttcaggccacagagtgggcctccagtgaggacacgcgccgctcctgccaaagcaaagggaagactgaggaggagtgtcagaactacgtgcgagtcctgatcgtcgccggccggaaggtgttcatgtgtggaaccaatgccttttcccccatgtgcaccagcagacaggtggggaacctcagccggactactgagaagatcaatggtgtggcccgctgcccctatgacccacgccacaactccacagctgtcatctcctcccagggggagctctatgcagccacggtcatcgacttctcaggtcgggaccctgccatctaccgcagcctgggcagtgggccaccgcttcgcactgcccaatataactccaagtggcttaatgagccaaacttcgtggcagcctatgatattgggctgtttgcatacttcttcctgcgggagaacgcagtggagcacgactgtggacgcaccgtgtactctcgcgtggcccgcgtgtgcaagaatgacgtggggggccgattcctgctggaggacacatggaccacattcatgaaggcccggctcaactgctcccgcccgggcgaggtccccttctactataacgagctgcagagtgccttccacttgccagagcaggacctcatctatggagttttcacaaccaacgtaaacagcatcgcggcttctgctgtctgcgccttcaacctcagtgctatctcccaggctttcaatggcccatttcgctaccaggagaaccccagggctgcctggctccccatagccaaccccatccccaatttccagtgtggcaccctgcctgagaccggtcccaacgagaacctgacggagcgcagcctgcaggacgcgcagcgcctcttcctgatgagcgaggccgtgcagccggtgacacccgagccctgtgtcacccaggacagcgtgcgcttctcacacctcgtggtggacctggtgcaggctaaagacacgctctaccatgtactctacattggcaccgagtcgggcaccatcctgaaggcgctgtccacggcgagccgcagcctccacggctgctacctggaggagctgcacgtgctgccccccgggcgccgcgagcccctgcgcagcctgcgcatcctgcacagcgcccgcgcgctcttcgtggggctgagagacggcgtcctgcgggtcccactggagaggtgcgccgcctaccgcagccagggggcatgcctgggggcccgggacccgtactgtggctgggacgggaagcagcaacgttgcagcacactcgaggacagctccaacatgagcctctggacccagaacatcaccgcctgtcctgtgcggaatgtgacacgggatgggggcttcggcccatggtcaccatggcaaccatgtgagcacttggatggggacaactcaggctcttgcctgtgtcgagctcgatcctgtgattcccctcgaccccgctgtgggggccttgactgcctggggccagccatccacatcgccaactgctccaggaatggggcgtggaccccgtggtcatcgtgggcgctgtgcagcacgtcctgtggcatcggcttccaggtccgccagcgaagttgcagcaaccctgctccccgccacgggggccgcatctgcgtgggcaagagccgggaggaacggttctgtaatgagaacacgccttgcccggtgcccatcttctgggcttcctggggctcctggagcaagtgcagcagcaactgtggagggggcatgcagtcgcggcgtcgggcctgcgagaacggcaactcctgcctgggctgcggcgtggagttcaagacgtgcaaccccgagggctgccccgaagtgcggcgcaacaccccctggacgccgtggctgcccgtgaacgtgacgcagggcggggcacggcaggagcagcggttccgcttcacctgccgcgcgccccttgcagacccgcacggcctgcagttcggcaggagaaggaccgagacgaggacctgtcccgcggacggctccggctcctgcgacaccgacgccctggtggaggacctcctgcgcagcgggagcacctccccgcacacggtgagcgggggctgggccgcctggggcccgtggtcgtcctgctcccgggactgcgagctgggcttccgcgtccgcaagagaacgtgcactaacccggagccccgcaacgggggcctgccctgcgtgggcgatgctgccgagtaccaggactgcaacccccaggcttgcccagttcggggtgcttggtcctgctggacctcatggtctccatgctcagcttcctgtggtgggggtcactatcaacgcacccgttcctgcaccagccccgcaccctccccaggtgaggacatctgtctcgggctgcacacggaggaggcactatgtgccacacaggcctgcccagaaggctggtcgccctggtctgagtggagtaagtgcactgacgacggagcccagagccgaagccggcactgtgaggagctcctcccagggtccagcgcctgtgctggaaacagcagccagagccgcccctgcccctacagcgagattcccgtcatcctgccagcctccagcatggaggaggccaccggctgtgcagggttcaatctcatccacttggtggccacgggcatctcctgcttcttgggctctgggctcctgaccctagcagtgtacctgtcttgccagcactgccagcgtcagtcccaggagtccacactggtccatcctgccacccccaaccatttgcactacaagggcggaggcaccccgaagaatgaaaagtacacacccatggaattcaagaccctgaacaagaataacttgatccctgatgacagagccaacttctacccattgcagcagaccaatgtgtacacgactacttactacccaagccccctgaacaaacacagcttccggcccgaggcctcacctggacaacggtgcttccccaacagc

SEQ ID NO: 1855 - DNA, 3279 bp, Homo sapiens
atggtgcttgcaggccccctggctgtctcgctgttgctgcccagcctcacactgctggtgtcccacctctccagctcccaggatgtctccagtgagcccagcagtgagcagcagctgtgcgcccttagcaagcaccccaccgtggcctttgaagacctgcagccgtgggtctctaacttcacctaccctggagcccgggatttctcccagctggctttggacccctccgggaaccagctcatcgtgggagccaggaactacctcttcagactcagccttgccaatgtctctcttcttcaggccacagagtgggcctccagtgaggacacgcgccgctcctgccaaagcaaagggaagactgaggaggagtgtcagaactacgtgcgagtcctgatcgtcgccggccggaaggtgttcatgtgtggaaccaatgccttttcccccatgtgcaccagcagacaggtggggaacctcagccggactactgagaagatcaatggtgtggcccgctgcccctatgacccacgccacaactccacagctgtcatctcctcccagggggagctctatgcagccacggtcatcgacttctcaggtcgggaccctgccatctaccgcagcctgggcagtgggccaccgcttcgcactgcccaatataactccaagtggcttaatgagccaaacttcgtggcagcctatgatattgggctgtttgcatacttcttcctgcgggagaacgcagtggagcacgactgtggacgcaccgtgtactctcgcgtggcccgcgtgtgcaagaatgacgtggggggccgattcctgctggaggacacatggaccacattcatgaaggcccggctcaactgctcccgcccgggcgaggtccccttctactataacgagctgcagagtgccttccacttgccagagcaggacctcatctatggagttttcacaaccaacgtaaacagcatcgcggcttctgctgtctgcgccttcaacctcagtgctatctcccaggctttcaatggcccatttcgctaccaggagaaccccagggctgcctggctccccatagccaaccccatccccaatttccagtgtggcaccctgcctgagaccggtcccaacgagaacctgacggagcgcagcctgcaggacgcgcagcgcctcttcctgatgagcgaggccgtgcagccggtgacacccgagccctgtgtcacccaggacagcgtgcgcttctcacacctcgtggtggacctggtgcaggctaaagacacgctctaccatgtactctacattggcaccgagtcgggcaccatcctgaaggcgctgtccacggcgagccgcagcctccacggctgctacctggaggagctgcacgtgctgccccccgggcgccgcgagcccctgcgcagcctgcgcatcctgcacagcgcccgcgcgctcttcgtggggctgagagacggcgtcctgcgggtcccactggagaggtgcgccgcctaccgcagccagggggcatgcctgggggcccgggacccgtactgtggctgggacgggaagcagcaacgttgcagcacactcgaggacagctccaacatgagcctctggacccagaacatcaccgcctgtcctgtgcggaatgtgacacgggatgggggcttcggcccatggtcaccatggcaaccatgtgagcacttggatggggacaactcaggctcttgcctgtgtcgagctcgatcctgtgattcccctcgaccccgctgtgggggccttgactgcctggggccagccatccacatcgccaactgctccaggaatggggcgtggaccccgtggtcatcgtgggcgctgtgcagcacgtcctgtggcatcggcttccaggtccgccagcgaagttgcagcaaccctgctccccgccacgggggccgcatctgcgtgggcaagagccgggaggaacggttctgtaatgagaacacgccttgcccggtgcccatcttctgggcttcctggggctcctggagcaagtgcagcagcaactgtggagggggcatgcagtcgcggcgtcgggcctgcgagaacggcaactcctgcctgggctgcggcgtggagttcaagacgtgcaaccccgagggctgccccgaagtgcggcgcaacaccccctggacgccgtggctgcccgtgaacgtgacgcagggcggggcacggcaggagcagcggttccgcttcacctgccgcgcgccccttgcagacccgcacggcctgcagttcggcaggagaaggaccgagacgaggacctgtcccgcggacggctccggctcctgcgacaccgacgccctggtggaggacctcctgcgcagcgggagcacctccccgcacacggtgagcgggggctgggccgcctggggcccgtggtcgtcctgctcccgggactgcgagctgggcttccgcgtccgcaagagaacgtgcactaacccggagccccgcaacgggggcctgccctgcgtgggcgatgctgccgagtaccaggactgcaacccccaggcttgcccagttcggggtgcttggtcctgctggacctcatggtctccatgctcagcttcctgtggtgggggtcactatcaacgcacccgttcctgcaccagccccgcaccctccccaggtgaggacatctgtctcgggctgcacacggaggaggcactatgtgccacacaggcctgcccagaaggctggtcgccctggtctgagtggagtaagtgcactgacgacggagcccagagccgaagccggcactgtgaggagctcctcccagggtccagcgcctgtgctggaaacagcagccagagccgcccctgcccctacagcgagattcccgtcatcctgccagcctccagcatggaggaggccaccggctgtgcagggttcaatctcatccacttggtggccacgggcatctcctgcttcttgggctctgggctcctgaccctagcagtgtacctgtcttgccagcactgccagcgtcagtcccaggagtccacactggtccatcctgccacccccaaccatttgcactacaagggcggaggcaccccgaagaatgaaaagtacacacccatggaattcaagaccctgaacaagaataacttgatccctgatgacagagccaacttctacccattgcagcagaccaatgtgtacacgactacttactacccaagccccctgaacaaacacagcttccggcccgaggcctcacctggacaacggtgcttccccaacagc

SEQ ID NO: 1856 - protein, 1202 aa, Homo sapiens
AAAPFPDRPPAHLVSSRRSAPPGSREPRGTGHLHPPLGVSGSSWCLACVSWMPCGFSPSPVAHHLVPGPPDTPAQQLRCGWTVGGWLLSLVRGLLPCLPPGARTAEGPIMVLAGPLAVSLLLPSLTLLVSHLSSSQDVSSEPSSEQQLCALSKHPTVAFEDLQPWVSNFTYPGARDFSQLALDPSGNQLIVGARNYLFRLSLANVSLLQATEWASSEDTRRSCQSKGKTEEECQNYVRVLIVAGRKVFMCGTNAFSPMCTSRQVGNLSRTTEKINGVARCPYDPRHNSTAVISSQGELYAATVIDFSGRDPAIYRSLGSGPPLRTAQYNSKWLNEPNFVAAYDIGLFAYFFLRENAVEHDCGRTVYSRVARVCKNDVGGRFLLEDTWTTFMKARLNCSRPGEVPFYYNELQSAFHLPEQDLIYGVFTTNVNSIAASAVCAFNLSAISQAFNGPFRYQENPRAAWLPIANPIPNFQCGTLPETGPNENLTERSLQDAQRLFLMSEAVQPVTPEPCVTQDSVRFSHLVVDLVQAKDTLYHVLYIGTESGTILKALSTASRSLHGCYLEELHVLPPGRREPLRSLRILHSARALFVGLRDGVLRVPLERCAAYRSQGACLGARDPYCGWDGKQQRCSTLEDSSNMSLWTQNITACPVRNVTRDGGFGPWSPWQPCEHLDGDNSGSCLCRARSCDSPRPRCGGLDCLGPAIHIANCSRNGAWTPWSSWALCSTSCGIGFQVRQRSCSNPAPRHGGRICVGKSREERFCNENTPCPVPIFWASWGSWSKCSSNCGGGMQSRRRACENGNSCLGCGVEFKTCNPEGCPEVRRNTPWTPWLPVNVTQGGARQEQRFRFTCRAPLADPHGLQFGRRRTETRTCPADGSGSCDTDALVEDLLRSGSTSPHTVSGGWAAWGPWSSCSRDCELGFRVRKRTCTNPEPRNGGLPCVGDAAEYQDCNPQACPVRGAWSCWTSWSPCSASCGGGHYQRTRSCTSPAPSPGEDICLGLHTEEALCATQACPEGWSPWSEWSKCTDDGAQSRSRHCEELLPGSSACAGNSSQSRPCPYSEIPVILPASSMEEATGCAGFNLIHLVATGISCFLGSGLLTLAVYLSCQHCQRQSQESTLVHPATPNHLHYKGGGTPKNEKYTPMEFKTLNKNNLIPDDRANFYPLQQTNVYTTTYYPSPLNKHSFRPEASPGQRCFPNS

SEQ ID NO: 1857 - protein, 1151 aa, Homo sapiens
MPCGFSPSPVAHHLVPGPPDTPAQQLRCGWTVGGWLLSLVRGLLPCLPPGARTAEGPIMVLAGPLAVSLLLPSLTLLVSHLSSSQDVSSEPSSEQQLCALSKHPTVAFEDLQPWVSNFTYPGARDFSQLALDPSGNQLIVGARNYLFRLSLANVSLLQATEWASSEDTRRSCQSKGKTEEECQNYVRVLIVAGRKVFMCGTNAFSPMCTSRQVGNLSRTTEKINGVARCPYDPRHNSTAVISSQGELYAATVIDFSGRDPAIYRSLGSGPPLRTAQYNSKWLNEPNFVAAYDIGLFAYFFLRENAVEHDCGRTVYSRVARVCKNDVGGRFLLEDTWTTFMKARLNCSRPGEVPFYYNELQSAFHLPEQDLIYGVFTTNVNSIAASAVCAFNLSAISQAFNGPFRYQENPRAAWLPIANPIPNFQCGTLPETGPNENLTERSLQDAQRLFLMSEAVQPVTPEPCVTQDSVRFSHLVVDLVQAKDTLYHVLYIGTESGTILKALSTASRSLHGCYLEELHVLPPGRREPLRSLRILHSARALFVGLRDGVLRVPLERCAAYRSQGACLGARDPYCGWDGKQQRCSTLEDSSNMSLWTQNITACPVRNVTRDGGFGPWSPWQPCEHLDGDNSGSCLCRARSCDSPRPRCGGLDCLGPAIHIANCSRNGAWTPWSSWALCSTSCGIGFQVRQRSCSNPAPRHGGRICVGKSREERFCNENTPCPVPIFWASWGSWSKCSSNCGGGMQSRRRACENGNSCLGCGVEFKTCNPEGCPEVRRNTPWTPWLPVNVTQGGARQEQRFRFTCRAPLADPHGLQFGRRRTETRTCPADGSGSCDTDALVEDLLRSGSTSPHTVSGGWAAWGPWSSCSRDCELGFRVRKRTCTNPEPRNGGLPCVGDAAEYQDCNPQACPVRGAWSCWTSWSPCSASCGGGHYQRTRSCTSPAPSPGEDICLGLHTEEALCATQACPEGWSPWSEWSKCTDDGAQSRSRHCEELLPGSSACAGNSSQSRPCPYSEIPVILPASSMEEATGCAGFNLIHLVATGISCFLGSGLLTLAVYLSCQHCQRQSQESTLVHPATPNHLHYKGGGTPKNEKYTPMEFKTLNKNNLIPDDRANFYPLQQTNVYTTTYYPSPLNKHSFRPEASPGQRCFPNS

SEQ ID NO: 1858 - protein, 1093 aa, Homo sapiens
MVLAGPLAVSLLLPSLTLLVSHLSSSQDVSSEPSSEQQLCALSKHPTVAFEDLQPWVSNFTYPGARDFSQLALDPSGNQLIVGARNYLFRLSLANVSLLQATEWASSEDTRRSCQSKGKTEEECQNYVRVLIVAGRKVFMCGTNAFSPMCTSRQVGNLSRTTEKINGVARCPYDPRHNSTAVISSQGELYAATVIDFSGRDPAIYRSLGSGPPLRTAQYNSKWLNEPNFVAAYDIGLFAYFFLRENAVEHDCGRTVYSRVARVCKNDVGGRFLLEDTWTTFMKARLNCSRPGEVPFYYNELQSAFHLPEQDLIYGVFTTNVNSIAASAVCAFNLSAISQAFNGPFRYQENPRAAWLPIANPIPNFQCGTLPETGPNENLTERSLQDAQRLFLMSEAVQPVTPEPCVTQDSVRFSHLVVDLVQAKDTLYHVLYIGTESGTILKALSTASRSLHGCYLEELHVLPPGRREPLRSLRILHSARALFVGLRDGVLRVPLERCAAYRSQGACLGARDPYCGWDGKQQRCSTLEDSSNMSLWTQNITACPVRNVTRDGGFGPWSPWQPCEHLDGDNSGSCLCRARSCDSPRPRCGGLDCLGPAIHIANCSRNGAWTPWSSWALCSTSCGIGFQVRQRSCSNPAPRHGGRICVGKSREERFCNENTPCPVPIFWASWGSWSKCSSNCGGGMQSRRRACENGNSCLGCGVEFKTCNPEGCPEVRRNTPWTPWLPVNVTQGGARQEQRFRFTCRAPLADPHGLQFGRRRTETRTCPADGSGSCDTDALVEDLLRSGSTSPHTVSGGWAAWGPWSSCSRDCELGFRVRKRTCTNPEPRNGGLPCVGDAAEYQDCNPQACPVRGAWSCWTSWSPCSASCGGGHYQRTRSCTSPAPSPGEDICLGLHTEEALCATQACPEGWSPWSEWSKCTDDGAQSRSRHCEELLPGSSACAGNSSQSRPCPYSEIPVILPASSMEEATGCAGFNLIHLVATGISCFLGSGLLTLAVYLSCQHCQRQSQESTLVHPATPNHLHYKGGGTPKNEKYTPMEFKTLNKNNLIPDDRANFYPLQQTNVYTTTYYPSPLNKHSFRPEASPGQRCFPNS

SEQ ID NO: 1859 - DNA, 552 bp, Homo sapiens
atgaagagcgtcttgctgctgaccacgctcctcgtgcctgcacacctggtggccgcctggagcaataattatgcggtggactgccctcaacactgtgacagcagtgagtgcaaaagcagcccgcgctgcaagaggacagtgctcgacgactgtggctgctgccgagtgtgcgctgcagggcggggagaaacttgctaccgcacagtctcaggcatggatggcatgaagtgtggcccggggctgaggtgtcagccttctaatggggaggatccttttggtgaagagtttggtatctgcaaagactgtccctacggcaccttcgggatggattgcagagagacctgcaactgccagtcaggcatctgtgacagggggacgggaaaatgcctgaaattccccttcttccaatattcagtaaccaagtcttccaacagatttgtttctctcacggagcatgacatggcatctggagatggcaatattgtgagagaagaagttgtgaaagagaatgctgccgggtctcccgtaatgaggaaatggttaaatccacgc

SEQ ID NO: 1860 - DNA, 396 bp, Homo sapiens
atggtggaggctttctgtgctacctggaagctgaccaacagtcagaactttgatgagtacatgaaggctctaggcgtgggctttgccactaggcaggtgggaaatgtgaccaaaccaacggtaattatcagtcaagaaggagacaaagtggtcatcaggactctcagcacattcaagaacacggagattagtttccagctgggagaagagtttgatgaaaccactgcagatgatagaaactgtaagtctgttgttagcctggatggagacaaacttgttcacatacagaaatgggatggcaaagaaacaaattttgtaagagaaattaaggatggcaaaatggttatgacccttacttttggtgatgtggttgctgttcgccactatgagaaggca

SEQ ID NO: 1861 - DNA, 918 bp, Homo sapiens
atggcggttgcgcgcttggcagctgtggcggcctgggtaccttgtcggagctggggctgggcagccgtccccttcggtccccaccgtggcctcagcgtgctgcttgcacggatacctcagcgggcgccacggtggctcccagcttgtagacaaaagacgtcactctcattccttaatcgaccagaccttccaaacctggcttataagaagctaaaaggcaaaagtccaggaattatcttcatccctggctatctttcttatatgaatggtacaaaagcgttggcgattgaggagttttgcaaatctctaggtcacgcctgcataaggtttgattactcaggagttggaagttcagatggtaactcagaggaaagcacactggggaaatggagaaaagatgttctttctataattgatgacttagctgatgggccacagattcttgttggatctagcctcggagggtggcttatgcttcatgctgcaattgcacgaccagagaaggtcgtggctcttattggtgtagctacagctgcagataccttagtgacaaagtttaatcagcttcctgttgagctaaaaaaggaagtagagatgaaaggtgtgtggagcatgccatcaaaatactctgaagaaggagtttataacgttcagtacagtttcattaaagaagctgaacatcactgcttgttacatagcccaattcctgtgaactgccccataagattgctccatggcatgaaggatgacattgtaccttggcatacatcaatgcaggttgccgatcgagtactcagcacagatgtggatgtcatcctccgaaaacacagtgatcaccgaatgagggaaaaagcagacattcaacttcttgtttacactattgatgacttaattgataagctctcaactatagttaac

SEQ ID NO: 1862 - DNA, 1959 bp, Homo sapiens
  misc_feature 340,552,740,869,1802,1811: n = A,T,C or G
atggagccttcgggcagtgaacagttatttgaggaccctgatcctggaggcaaatcccaagatgcagaggccagaaagcagacagaatcagaacaaaaattgtctaaaatgacccacaatgctttggagaacattaacgtgattggccaaggcttgaagcatctcttccagcaccagcgcaggaggtcatcagtgtctccacatgatgtgcagcaaattcaggcagatccagaacctgaaatggatctggaaagccagaacgcatgtgctgagattgatggtgtccccacccaccccacagctctgaatcgtgtcctgcagcagattcgagtgccacccnagatgaagagagggacaagcttgcatagtaggcggggcaagccagaggccccaaagggaagtccccaaatcaacaggaagtctggtcaggagatgacagctgttatgcagtcaggccgacccatgtcttcatccacaactgatgcacctaccggctctgctatgatggaaatagcttgtgctgctgctgctgctgctgctgcatgtctaccnggagaggagggaactgcggagcggatcgaacggttggaagtaagcagccttgcccaaacatccagtgcagtggcctccagtaccgatggcagcatccacacagactctgtggatggaacaccagaccctcagcgcacaaaggctgccattgctcacctgcagcagaagatcctgaagctcacagaacnaatcaagattgcacaaacagcccgggacgacaacgttgctgaatacttgaagcttgccaacagtgcagacaaacagcaggctgcccgcatcaagcaagtctttgagaagaagaaccagaaatctgcccnaactatcctccagctgcaaaagaaacttgagcactaccacaggaagctcagagaggtagagcagaatgggatcccccggcagccaaaggatgtcttcagggacatgcaccagggtctgaaggatgtaggagcaaaggtgactggcttcagtgaaggtgtggtggatagtgtcaaaggtgggttttccagcttctcccaggccacccattcagcagcaggcgctgtagtctcaaagcccagagagattgcctcactcattcggaacaaatttggcagtgcagacaacatccccaacctgaaggactctttagaggaagggcaagtggatgatgcggggaaggctttgggagtgatttcaaactttcagtctagcccaaaatatggtagtgaagaagattgttctagtgccacttcaggctcagtgggagccaacagcaccacagggggcatcgctgtaggagcatccagctccaaaacaaacaccctggacatgcagagctcaggatttgatgcactactacatgagatccaggagatccgggaaacccaggccagactagaggaatcctttgagactctcaaggaacattatcagagggactattccttaataatgcagaccttacaggaggagcgatatagatgtgaacgattggaagaacagctaaatgacctaacagagctccaccagaatgaaatcttgaacttgaagcaggaactggcaagcatggaagaaaaaatcgcgtatcagtcctatgaacgggcccgggacatccaggaggccctggaggcatgccagacgcgcatctccaagatggagctgcagcagcagcagcagcaggtggtgcagctagaagggctggagaatgccactgcccggaaccttctgggcaaactcatcaacatcctcctggctgtcatggcagtcctttnggtctttgnctccactgtagccaactgtgtggtccccctcatgaagactcgcaacaggacgttcagcactttattccttgtggtttttattgcctttctctggaagcactgggacgccctcttcagctatgtggaacggttcttttcatcccctaga

SEQ ID NO: 1863 - protein, 306 aa, Homo sapiens
MAVARLAAVAAWVPCRSWGWAAVPFGPHRGLSVLLARIPQRAPRWLPACRQKTSLSFLNRPDLPNLAYKKLKGKSPGIIFIPGYLSYMNGTKALAIEEFCKSLGHACIRFDYSGVGSSDGNSEESTLGKWRKDVLSIIDDLADGPQILVGSSLGGWLMLHAAIARPEKVVALIGVATAADTLVTKFNQLPVELKKEVEMKGVWSMPSKYSEEGVYNVQYSFIKEAEHHCLLHSPIPVNCPIRLLHGMKDDIVPWHTSMQVADRVLSTDVDVILRKHSDHRMREKADIQLLVYTIDDLIDKLSTIVN

What is claimed:

1. An isolated polynucleotide comprising a sequence selected from the group consisting of:
(a) sequences provided in SEQ ID NOs:1-1847, 1852-1855, and 1859-1862;
(b) complements of the sequences provided in SEQ ID NOs:1-1847, 1852-1855, and 1859-1862;
(c) sequences consisting of at least 20 contiguous residues of a sequence provided in SEQ ID NOs:1-1847, 1852-1855, and 1859-1862;
(d) sequences that hybridize to a sequence provided in SEQ ID NOs:1-1847, 1852-1855, and 1859-1862, under highly stringent conditions;
(e) sequences having at least 75% identity to a sequence of SEQ ID NOs:1-1847, 1852-1855, and 1859-1862;
(f) sequences having at least 90% identity to a sequence of SEQ ID NOs:1-1847, 1852-1855, and 1859-1862; and
(g) degenerate variants of a sequence provided in SEQ ID NOs:1-1847, 1852-1855, and 1859-1862.

2. An isolated polypeptide comprising an amino acid sequence selected from the group consisting of:
(a) sequences encoded by a polynucleotide of claim 1;
(b) sequences having at least 70% identity to a sequence encoded by a polynucleotide of claim 1;
(c) sequences having at least 90% identity to a sequence encoded by a polynucleotide of claim 1;
(d) sequences set forth in SEQ ID NOs:1848-1851, 1856-1858, and 1863;
(e) sequences having at least 70% identity to a sequence set forth in 1848-1851, 1856-1858, and 1863;
(f) sequences having at least 90% identity to a sequence set forth in 1848-1851, 1856-1858, and 1863.

3. An expression vector comprising a polynucleotide of claim 1 operably linked to an expression control sequence.

4. A host cell transformed or transfected with an expression vector according to claim 3.

5. An isolated antibody, or antigen-binding fragment thereof, that specifically binds to a polypeptide of claim 2.

6. A method for detecting the presence of a cancer in a patient, comprising the steps of:
(a) obtaining a biological sample from the patient;
(b) contacting the biological sample with a binding agent that binds to a polypeptide of claim 2;
(c) detecting in the sample an amount of polypeptide that binds to the binding agent; and
(d) comparing the amount of polypeptide to a predetermined cut-off value and therefrom determining the presence of a cancer in the patient.

7. A fusion protein comprising at least one polypeptide according to claim 2.

8. An oligonucleotide that hybridizes to a sequence recited in SEQ ID NOs:1-1847, 1852-1855, and 1859-1862 under highly stringent conditions.

9. A method for stimulating and/or expanding T cells specific for a tumor protein, comprising contacting T cells with at least one component selected from the group consisting of:
(a) polypeptides according to claim 2;
(b) polynucleotides according to claim 1; and
(c) antigen-presenting cells that express a polynucleotide according to claim 1,
under conditions and for a time sufficient to permit the stimulation and/or expansion of T cells.

10. An isolated T cell population, comprising T cells prepared according to the method of claim 9.

11. A composition comprising a first component selected from the group consisting of physiologically acceptable carriers and immunostimulants, and a second component selected from the group consisting of:
(a) polypeptides according to claim 2;
(b) polynucleotides according to claim 1;
(c) antibodies according to claim 5;
(d) fusion proteins according to claim 7;
(e) T cell populations according to claim 10; and
(f) antigen presenting cells that express a polypeptide according to claim 2.

12. A method for stimulating an immune response in a patient, comprising administering to the patient a composition of claim 11.

13. A method for the treatment of a kidney cancer in a patient, comprising administering to the patient a composition of claim 11.

14. A method for determining the presence of a cancer in a patient, comprising the steps of:
(a) obtaining a biological sample from the patient;
(b) contacting the biological sample with an oligonucleotide according to claim 8;
(c) detecting in the sample an amount of a polynucleotide that hybridizes to the oligonucleotide; and
(d) comparing the amount of polynucleotide that hybridizes to the oligonucleotide to a predetermined cut-off value, and therefrom determining the presence of the cancer in the patient.

15. A diagnostic kit comprising at least one oligonucleotide according to claim 8.

16. A diagnostic kit comprising at least one antibody according to claim 5 and a detection reagent, wherein the detection reagent comprises a reporter group.

17. A method for the treatment of kidney cancer in a patient, comprising the steps of:
(a) incubating CD4+ and/or CD8+ T cells isolated from a patient with at least one component selected from the group consisting of: (i) polypeptides according to claim 2; (ii) polynucleotides according to claim 1; and (iii) antigen presenting cells that express a polypeptide of claim 2, such that T cell proliferate;
(b) administering to the patient an effective amount of the proliferated T cells, and thereby inhibiting the development of a cancer in the patient.
